(19) United States
(12) Patent Application Publication
(10) Pub. No.: US 2022/0049273 A1
(43) Pub. Date: Feb. 17, 2022

(54) NOVEL CRISPR DNA TARGETING ENZYMES AND SYSTEMS

(71) Applicant: ARBOR BIOTECHNOLOGIES, INC., Cambridge, MA (US)

(72) Inventors: David R. Cheng, Boston, MA (US); David A. Scott, Cambridge, MA (US); Winston X. Yan, Boston, MA (US); Jason Carte, Boston, MA (US); Elise Keston-Smith, Cambridge, MA (US); Pratyusha Hunnewell, Needham, MA (US); Shaorong Chong, Cambridge, MA (US)

(21) Appl. No.: 17/435,563

(22) PCT Filed: Feb. 28, 2020
(86) PCT No.: PCT/US2020/020426

§ 371 Date: Sep. 1, 2021

Related U.S. Application Data
(60) Provisional application No. 62/812,919, filed on Mar. 1, 2019.
(60) Provisional application No. 62/869,454, filed on Jul. 1, 2019.

(51) Int. Cl. C12N 15/90; C12N 9/22; C12N 15/11; C12N 15/86

(52) U.S. Cl. CPC C12N 15/902; C12N 9/22; C12N 15/111; C12N 2750/14143; C07K 2319/09; C12N 2310/20; C12N 15/86

(57) ABSTRACT

The disclosure describes novel systems, methods, and compositions for the manipulation of nucleic acids in a targeted fashion. The disclosure describes non-naturally occurring, engineered CRISPR-Cas systems, components, and methods for targeted modification of nucleic acids such as DNA. Each system includes one or more protein components and one or more nucleic acid components that together target nucleic acids.

### CROSS REFERENCE TO RELATED APPLICATIONS

[0001] This application claims priority to U.S. Ser. No. 62/812,919, filed Mar. 1, 2019, and U.S. Ser. No. 62/869,454, filed Jul. 1, 2019. The content of each of the foregoing applications is hereby incorporated by reference in its entirety.

### SEQUENCE LISTING

[0002] The instant application contains a Sequence Listing which has been submitted electronically in ASCII format and is hereby incorporated by reference in its entirety. Said ASCII copy, created on Feb. 27, 2020, is named A2186-7015WO_SL.txt and is 1,436,701 bytes in size.

### FIELD OF THE INVENTION

[0003] The present disclosure relates to novel CRISPR-Cas system compositions and methods of using the compositions, for example, nucleic acid targeting.

### BACKGROUND

[0004] Recent application of advances in genome sequencing technologies and analysis have yielded significant insights into the genetic underpinning of biological activities in many diverse areas of nature, ranging from prokaryotic biosynthetic pathways to human pathologies. To fully understand and evaluate the vast quantities of information produced by genetic sequencing technologies, equivalent increases in the scale, efficacy, and ease of technologies for genome and epigenome manipulation are needed. These novel genome and epigenome engineering technologies will accelerate the development of novel applications in numerous areas, including biotechnology, agriculture, and human therapeutics.

[0005] Clustered Regularly Interspaced Short Palindromic Repeats (CRISPR) and the CRISPR-associated (Cas) genes, collectively known as the CRISPR-Cas or CRISPR/Cas systems, are currently understood to provide immunity to bacteria and archaea against phage infection. The CRISPR-Cas systems of prokaryotic adaptive immunity are an extremely, diverse group of proteins effectors, non-coding elements, as well as loci architectures, some examples of which have been engineered and adapted to produce important biotechnologies.

[0006] The components of the system involved in host defense include one or more effector proteins capable of modifying DNA or RNA and an RNA guide element that is responsible to targeting these protein activities to a specific sequence on the phage DNA or RNA. The RNA guide is composed of a CRISPR RNA (crRNA) and may require an additional trans-activating RNA (tracrRNA) to enable targeted nucleic acid manipulation by the effector protein(s). The crRNA consists of a direct repeat responsible for protein binding to the crRNA and a spacer sequence that is complementary to the desired nucleic acid target sequence. CRISPR-Cas systems can be reprogrammed to target alternative DNA or RNA targets by modifying the spacer sequence of the crRNA.

[0007] CRISPR-Cas systems can be broadly classified into two classes: Class 1 systems are composed of multiple effector proteins that together form a complex around a crRNA, and Class 2 systems consist of a single effector protein that complexes with the crRNA to target DNA or RNA substrates. The single-subunit effector composition of the Class 2 systems provides a simpler component set for engineering and application translation and have thus far been an important source of programmable effectors. Thus, the discovery, engineering, and optimization of novel Class 2 systems may lead to widespread and powerful programmable technologies for genome engineering and beyond.

[0008] The characterization and engineering of Class 2 CRISPR-Cas systems, exemplified by CRISPR-Cas9, have paved the way for a diverse array of biotechnology applications in genome editing and beyond. For example, the effector proteins Cas12a (Cpf1) and Cas13a (C2c2) possess non-target-specific “collateral” single-stranded-nuclease cleavage activities, which may be harnessed to create novel diagnostics, methods, and other applications. Nevertheless, there remains a need for additional programmable effectors and systems for modifying nucleic acids and polynucleotides (i.e., DNA, RNA, or any hybrid, derivative, or modification) beyond the current CRISPR-Cas systems that enable novel applications through their unique properties.

### SUMMARY

[0009] It is against the above background that the present invention provides certain advantages and advancements over the prior art.

[0010] Although this invention disclosed herein is not limited to specific advantages or functionalities, the invention provides a composition comprising a CRISPR-Cas effector protein or a nucleic acid encoding the CRISPR-Cas effector protein, wherein the CRISPR-Cas effector protein has at least 80% (e.g., 81%, 82%, 83%, 84%, 85%, 86%, 87%, 88%, 89%, 90%, 91%, 92%, 93%, 94%, 95%, 96%, 97%, 98%, 99% or 100%) identity to an amino acid sequence set forth in any one of SEQ ID NOs: 1057-1066.

[0011] In one aspect of the composition, the CRISPR-Cas effector protein has an amino acid sequence set forth in any one of SEQ ID NOs: 1057-1066.

[0012] The invention further provides a composition comprising a CRISPR-Cas effector protein or a nucleic acid encoding the CRISPR-Cas effector protein, wherein the CRISPR-Cas effector protein comprises a mutation in a RuvC motif.

[0013] In one aspect of a composition of invention, the CRISPR-Cas effector protein comprises a mutation in a catalytic residue of a RuvC motif.

[0014] In one aspect of a composition of invention, the RuvC motif is a RuvC I, RuvC II, and/or RuvC III motif.

[0015] In one aspect of a composition of invention, the CRISPR-Cas effector protein comprises at least 10% (e.g., 10%, 20%, 30%, 40%, 50%, 60%, 70%, 80%, 90%, or 100%) less nuclease activity than a reference composition.

[0016] In one aspect of a composition of invention, the CRISPR-Cas effector protein lacks nuclease activity.

[0017] In one aspect of a composition of invention, the CRISPR-Cas effector protein comprises at least 10% (e.g., 10%, 20%, 30%, 40%, 50%, 60%, 70%, 80%, 90%, or 100%) greater nuclease activity than a reference composition.

[0018] In one aspect of a composition of invention, the composition further comprises an RNA guide or a nucleic acid encoding the RNA guide, wherein the RNA guide comprises a direct repeat sequence and a spacer sequence, wherein the CRISPR-Cas effector protein binds to the RNA guide, and wherein the spacer sequence binds to a target nucleic acid.

[0019] In one aspect of a composition of invention, the spacer sequence comprises between 15 and 24 nucleotides in length. In one aspect of a composition of invention, the spacer sequence comprises between 16 and 22 nucleotides in length.

[0020] In one aspect of a composition of invention, the target nucleic acid comprises a sequence complementary to a nucleotide sequence in the spacer sequence.

[0021] In one aspect of a composition of invention, the CRISPR-Cas effector protein recognizes a protospacer adjacent motif (PAM) sequence in the target nucleic acid, wherein the PAM sequence comprises a nucleotide sequence set forth as 5′-TTN-3′ or 5′-YTN-3′, wherein N is any nucleotide and Y is cytosine or thymine.

[0022] In one aspect of a composition of invention, the target nucleic acid is DNA. In one aspect of a composition of invention, the target nucleic acid is supercoiled (e.g., plasmid) DNA. In one aspect of a composition of invention, the CRISPR-Cas effector protein further comprises at least one nuclear localization signal (NLS), at least one nuclear export signal (NES), or at least one NLS and at least one NES.

[0023] In one aspect of a composition of invention, the nucleic acid encoding the CRISPR-Cas effector protein is codon-optimized for expression in a cell.

[0024] In one aspect of a composition of invention, the nucleic acid encoding the CRISPR-Cas effector protein is operably linked to a promoter.

[0025] In one aspect of a composition of invention, the nucleic acid encoding the CRISPR-Cas effector protein is in a vector. In one aspect of a composition of invention, the vector comprises a retroviral vector, a lentiviral vector, a phage vector, an adenoviral vector, an adeno-associated vector, or a herpes simplex vector.

[0026] In one aspect of a composition of invention, the composition is present in a delivery system comprising a nanoparticle, a liposome, an exosome, a microvesicle, or a gene-gun.

[0027] The invention further provides a cell comprising a composition of the invention. In one aspect of the cell, the cell is a eukaryotic cell. In one aspect of the cell, the cell is a prokaryotic cell.

[0028] The invention further provides a method of expressing a composition of the invention, wherein the method comprises providing a composition of the invention and delivering the composition to the cell.

[0029] The present disclosure further provides non-naturally-occurring, engineered systems and compositions for new single-effector Class 2 CRISPR-Cas systems, together with methods for computational identification of new CRISPR-Cas systems from genomic databases, together with the development of the natural loci into engineered systems, and experimental validation and application translation. These new effectors are divergent in sequence to orthologs and homologs of existing Class 2 CRISPR effectors, and also have unique domain organizations. They provide additional features that include, but are not limited to, 1) novel DNA/RNA editing properties and control mechanisms, 2) smaller size for greater versatility in delivery strategies, 3) genotype triggered cellular processes such as cell death, and 4) programmable RNA-guided DNA insertion, excision, and mobilization. Adding the novel DNA-targeting systems described herein to the toolbox of techniques for genome and epigenome manipulation enables broad applications for specific, programmed perturbations.

[0030] This disclosure relates to new CRISPR-Cas systems including newly discovered enzymes and other components used to create minimal systems that can be used in non-natural environments, e.g., in bacteria other than those in which the system was initially discovered or in mammalian cells.

[0031] As used herein, the term “catalytic residue” refers to an amino acid that activates catalysis. A catalytic residue is an amino acid that is involved (e.g., directly involved) in catalysis. In some embodiments, a catalytic residue is a histidine, an aspartic acid, or a glutamic acid residue.

[0032] The term “cleavage event,” as used herein, refers to a DNA break in a target nucleic acid created by a nuclease of a CRISPR-Cas system described herein. In some embodiments, the cleavage event is a double-stranded DNA break. In some embodiments, the cleavage event is a single-stranded DNA break.

[0033] The term “CRISPR-Cas system” as used herein refers to nucleic acids and/or proteins involved in the expression of, or directing the activity of, CRISPR-Cas effectors, including sequences encoding CRISPR-Cas effectors, RNA guides, and other sequences and transcripts from a CRISPR locus.

[0034] The term “CRISPR array” as used herein refers to the nucleic acid (e.g., DNA) segment that includes CRISPR repeats and spacers, starting with the first nucleotide of the first CRISPR repeat and ending with the last nucleotide of the last (terminal) CRISPR repeat. Typically, each spacer in a CRISPR array is located between two repeats. The term “CRISPR repeat,” or “CRISPR direct repeat,” or “direct repeat,” as used herein, refers to multiple short direct repeating sequences, which show very little or no sequence variation within a CRISPR array.

[0035] The term “CRISPR RNA” or “crRNA” as used herein refers to an RNA molecule comprising a guide sequence used by a CRISPR effector to specifically target a nucleic acid sequence. Typically, crRNAs contain a sequence that mediates target recognition and a sequence that forms a duplex with a tracrRNA. The crRNA: tracrRNA duplex binds to a CRISPR effector. The term “donor template nucleic acid,” as used herein refers to a nucleic acid molecule that can be used by one or more cellular proteins to alter the structure of a target nucleic acid after a CRISPR enzyme described herein has altered a target nucleic acid. In some embodiments, the donor template nucleic acid is a double-stranded nucleic acid. In some embodiments, the donor template nucleic acid is a single-stranded nucleic acid. In some embodiments, the donor template nucleic acid is linear. In some embodiments, the donor template nucleic acid is circular (e.g., a plasmid). In some embodiments, the donor template nucleic acid is an exogenous nucleic acid molecule. In some embodiments, the donor template nucleic acid is an endogenous nucleic acid molecule (e.g., a chromosome).

[0036] The term “CRISPR-Cas effector,” “CRISPR effector,” “effector,” “CRISPR-associated protein,” or “CRISPR enzyme” as used herein refers to a protein that carries out an enzymatic activity or that binds to a target site on a nucleic acid specified by an RNA guide. In some embodiments, a CRISPR effector is a nuclease. In some embodiments, a CRISPR effector has endonuclease activity, nickase activity, exonuclease activity, and/or excision activity.

[0037] As used herein, the terms “domain” and “protein domain” refer to a distinct functional and/or structural unit of a protein. In some embodiments, a domain may comprise a conserved amino acid sequence.

[0038] As used herein, the term “enzymatic activity” refers to the catalytic ability of an enzyme. For example, enzymatic activity may include nuclease activity.

[0039] As used herein, the terms “engineered,” “genetically-engineered,” “genetically-modified,” “recombinant,” and “modified” are used interchangeably and indicate intentional human manipulation to create, or cause a change in, a sequence, combination of sequences, or composition such that the sequence, combination of sequences, or composition does not exist in nature. In some embodiments, a composition of the invention is a genetically-engineered composition.

[0040] As used herein, the term “nuclease” refers to an enzyme capable of cleaving a phosphodiester bond. A nuclease hydrolyzes phosphodiester bonds in a nucleic acid backbone.

[0041] As used herein the term “operably linked” refers to nucleic acid sequences or amino acid sequences placed into a functional relationship with one another. For instance, a promoter or enhancer is operably linked to a coding sequence if it affects the modulation of the transcription of the coding sequence. Operably linked DNA sequences encoding regulatory sequences are typically contiguous to the coding sequence. However, enhancers can be functional when separated from a promoter, e.g., by up to several kilobases or more. Accordingly, some nucleic acid molecules may be operably linked, but not contiguous.

[0042] As used herein, the terms “protospacer adjacent motif” and “PAM sequence” refer to a sequence located near or adjacent to a target sequence. As used herein, a PAM sequence is required for cleavage by a nuclease described herein.

[0043] As used herein, the terms “parent,” “nuclease parent,” and “parent sequence” refer to a nuclease to which an alteration is made to produce a variant nuclease of the present invention.

[0044] In some embodiments, the parent is a nuclease having an identical amino acid sequence of the variant at one or more of specified positions. The parent may be a naturally occurring (wild-type) polypeptide. In a particular embodiment, the parent is a nuclease with at least 60%, at least 61%, at least 62%, at least 63%, at least 64%, at least 65%, at least 70%, at least 72%, at least 73%, at least 74%, at least 75%, at least 80%, at least 81%, at least 82%, at least 83%, at least 84%, at least 85%, at least 90%, at least 91%, at least 92%, at least 93%, at least 94%, at least 95%, at least 96%, at least 97%, at least 98%, at least 99% or 100% identity to a polypeptide of SEQ ID NO: 1 or SEQ ID NO: 20.

[0045] As used herein, the terms “reference composition,” “reference sequence,” and “reference” refer to a control, such as a negative control or a parent (e.g., a parent sequence, a parent protein, or a wild-type protein). In some embodiments, a reference sequence is set forth in SEQ ID NO: 1 or SEQ ID NO: 20.

[0046] As used herein, the terms “RNA guide” or “RNA guide sequence” refer to a molecule that recognizes (e.g., binds to) a target nucleic acid. An RNA guide may be designed to be complementary to a specific nucleic acid sequence. An RNA guide comprises a spacer sequence and a direct repeat (DR) sequence. The terms CRISPR RNA (crRNA), pre-crRNA, mature crRNA, and CRISPR array are also used herein to refer to an RNA guide.

[0047] As used herein, the term “RuvC domain” refers to a conserved domain or motif of amino acids having nuclease (e.g., endonuclease) activity. As used herein, a protein having a split RuvC domain refers to a protein having two or more RuvC motifs, at sequentially disparate sites within a sequence, that interact in a tertiary structure to form a RuvC domain.

[0048] As used herein, the terms “target nucleic acid” and “target sequence” refer to a nucleic acid that is specifically bound by a targeting moiety. In some embodiments, the spacer sequence of an RNA guide binds to the target nucleic acid.

[0049] As used herein, the terms “trans-activating crRNA” and “tracrRNA” refer to an RNA molecule involved in or required for the binding of an RNA guide to a target nucleic acid.

[0050] As used herein, the terms “variant” and “mutant” refer to a protein comprising an alteration, e.g., a substitution, insertion, deletion and/or fusion, at one or more (or one or several) positions, compared to its parent sequence. In some embodiments, the variant is a CRISPR-Cas effector protein variant. In some embodiments, the variant has an amino acid sequence set forth in any one of SEQ ID NOs: 1057-1066.

[0051] As used herein, the term “subject,” refers to any mammals, including, without limitation, humans and other primates, including rhesus macaques, chimpanzees and other monkey and ape species; farm animals, such as cattle, sheep, pigs, goats, and horses; domestic mammals, such as dogs and cats; laboratory animals, including rabbits, mice, rats, and guinea pigs; as well as birds, including domestic, wild, and game birds, such as chickens, turkeys, ducks, and geese; and the like. The term includes adult, young, and newborn individuals as well as male and female subjects. In some embodiments, a host cell is derived from a subject (e.g., stem cells, progenitor cells, or tissue-specific cells). In some embodiments, the subject is a non-human subject.

[0052] Unless otherwise defined, all technical and scientific terms used herein have the same meaning as commonly understood by one of ordinary skill in the art to which this invention belongs. Although methods and materials similar or equivalent to those described herein can be used in the practice or testing of the present invention, suitable methods and materials are described below. All publications, patent applications, patents, and other references mentioned herein are incorporated by reference in their entirety. In case of conflict, the present specification, including definitions, will control. In addition, the materials, methods, and examples are illustrative only and not intended to be limiting.

[0053] Other features and advantages of the invention will be apparent from the following detailed description, and from the claims.

### BRIEF FIGURE DESCRIPTION

[0054] FIGS. 1A and 1B are a group of schematic sequence representations that together show conserved CLUST.018837 effectors and CRISPR array elements for representative loci.

[0055] FIG. 2A is a series of sequences that show the multiple sequence alignment of examples of CRISPR direct repeat elements for CLUST.018837.

[0056] FIG. 2B is a depiction of the 3′ end of a multiple sequence alignment of CLUST.018837 direct repeat sequences.

[0057] FIGS. 3A and 3B are a group of schematic diagrams that together show predicted secondary structure of the RNA transcript of examples of CLUST.018837 direct repeats.

[0058] FIGS. 4A, 4B, 4C, 4D, 4E, and 4F are schematic representations that together show a phylogenetic tree of CLUST.018837 effector proteins.

[0059] FIG. 5A shows PFAM domain mapping results for CLUST.018837 effector proteins.

[0060] FIG. 5B is a schematic representation of a multiple sequence alignment of CLUST.018837 effector proteins, with the locations of the conserved catalytic residues of the RuvC domain indicated by the short bars and RuvC-I/II/III annotations above the alignment.

[0061] FIGS. 6A, 6B, 6C, and 6D are a series of schematic representations that together show an example of an engineered, non-naturally occurring construct for the CLUST.018837 CRISPR-Cas system containing the NZ_LDOS01000005 effector protein and CRISPR array, both expressed separately from artificial promoters.

[0062] FIGS. 7A, 7B, 7C, 7D, and 7E are graphs that show the degree of depletion activity of the engineered constructs for CRISPR-Cas systems NZ_LDOS01000005, 3300009004, APMI01033782. NZ_LVXZ1000012, and ADIG01000806, respectively.

[0063] FIGS. 8A, 8B, 8C, 8D, and 8E are graphic representations that show the location of strongly depleted targets on the pACYC184 plasmid for the engineered CLUST.018837 CRISPR-Cas systems NZ_LDOS01000005, 3300009004, APMI01033782, NZ_LVXZ01000012, and ADIG01000806, respectively. Depleted targets on the top strand and bottom strand are shown separately, and in relation to the orientation of the annotated genes. Depleted targets are depicted by gray bars, with the length of the bar corresponding to the length of the matching spacer, and the shade corresponding to the magnitude of depletion (darker shades corresponding to more depletion). The light gray line indicates the total number of screened spacers targeting each nucleotide position, and the vertical gray lines delineate the boundaries between two features (e.g. tetracycline-resistance gene and the adjacent non-coding region).

[0064] FIGS. 9A, 9B, 9C, 9D, and 9E are graphic representations that show the locations of strongly depleted targets relative to the targeted E. coli essential genes for the engineered CLUST.018837 CRISPR-Cas systems NZ_LDOS01000005, 3300009004, APMI01033782, NZ_LVXZ01000012, and ADIG01000806, respectively.

[0065] FIGS. 10A, 10B, 10C, and 10D are graphic representations that show the locations of strongly depleted targets on the pACYC184 plasmid for the “effector deletion” (negative control) CLUST.018837 CRISPR-Cas constructs for 3300009004, APMI01033782, NZ_LVXZ01000012, and ADIG01000806, respectively.

[0066] FIGS. 11A, 11B, 11C, and 11D are graphic representations that show the locations of strongly depleted targets relative to the targeted E. coli essential genes for the “effector deletion” (negative control) CLUST.018837 CRISPR-Cas constructs for 3300009004, APMI01033782, NZ_LVXZ01000012, and ADIG01000806, respectively.

[0067] FIGS. 12A, 12B, 12C, 12D, and 12E show sequences flanking the sites of strongly depleted targets for the engineered CLUST.018837 CRISPR-Cas systems NZ_LDOS01000005, 3300009004, APMI01033782, NZ_LVXZ01000012, and ADIG01000806, respectively.

[0068] FIGS. 13A, 13B, and 13C show the mature crRNA (comprising a direct repeat and a spacer) for exemplary CLUST.018837 CRISPR-Cas systems NZ_LDOS01000005, 3300009004, and ADIG01000806, respectively. FIGS. 13A, 13B, and 13C also show sequence alignments of RNA-sequenced transcripts including the processed form of the direct repeat and the orientation of the spacer with regard to the direct repeat on the mature crRNA, the processed crRNA sequence, and the secondary structure of a mature crRNA for exemplary CLUST.018837 CRISPR-Cas systems, NZ_LDOS01000005, 3300009004, and ADIG01000806, respectively.

[0069] FIG. 14 is an image of a gel that shows processing of the pre-crRNA into a mature crRNA by the NZ_LDOS01000005 effector protein in a dose-dependent manner. Pre-crRNA processing in the presence of EDTA suggests that magnesium is not required.

[0070] FIGS. 15A and 15B are graphs that show depletion of GFP fluorescent signal by CLUST.018837 CRISPR-Cas systems NZ_LDOS01000005 (SEQ ID NO: 1) and ADIG01000806 (SEQ ID NO: 20), respectively, by in vitro transcription-translation assays. Effectors were targeted against linear or plasmid GFP, with “TS” and “BS” indicating whether the top strand or bottom strand of the GFP was targeted, respectively. “Apo” indicates that the effector was not complexed with pre-crRNA to form a ribonucleoprotein (RNP).

[0071] FIGS. 16A-F are graphs that show the effects of amino acid substitutions in putative RuvCI, RuvCII, and RuvCIII domains of CLUST.018837 CRISPR-Cas system NZ_LDOS01000005 on GFP fluorescent signal. Effectors were targeted against supercoiled plasmid GFP, with “TS” and “BS” indicating whether the bottom strand or top strand of GFP was targeted, respectively. “Apo” indicates that the effector was not complexed with pre-crRNA to form an RNP. The wild-type NZ_LDOS01000005 (SEQ ID NO: 1) is shown in FIG. 16A, and the NZ_LDOS01000005 mutants (SEQ ID NOs: 1057-1061) are shown in FIGS. 16B-F.

[0072] FIGS. 16G-L are graphs that show the effects of amino acid substitutions in putative RuvCI, RuvCII, and RuvCIII domains of CLUST.018837 CRISPR-Cas system ADIG01000806 on GFP fluorescent signal. Effectors were targeted against supercoiled plasmid GFP, with “TS” and “BS” indicating whether the bottom strand or top strand of GFP was targeted, respectively. “Apo” indicates that the effector was not complexed with pre-crRNA to form an RNP. The wild-type ADIG01000806 (SEQ ID NO: 20) is shown in FIG. 16G, and the ADIG01000806 mutants (SEQ ID NOs: 1062-1066) are shown in FIGS. 16H-L.

[0073] FIGS. 17A-D are graphs that show in vitro cleavage of supercoiled plasmid GFP by CLUST.018837 CRISPR-Cas system NZ_LDOS01000005 (SEQ ID NO: 1). The target region of the guide is indicated by a box, and arrows point to specific cleavage by the effector. Reads were binned by nucleotide position along the GFP plasmid and normalized to the total number of reads. 5′ and 3′ graphs indicate whether the reads were aligned to the 5′ or 3′ end of the GFP sequence. Data from two biological replicates are shown (BR1 and BR2).

[0074] FIGS. 17E-H are graphs that show in vitro cleavage of supercoiled plasmid GFP by CLUST.018837 CRISPR-Cas systems ADIG01000806 (SEQ ID NO: 20). The target region of the guide is indicated by a box, and arrows point to specific cleavage by the effector. Reads were binned by nucleotide position along the GFP plasmid and normalized to the total number of reads. 5′ and 3′ graphs indicate whether the reads were aligned to the 5′ or 3′ end of the GFP sequence. Data from two biological replicates are shown (BR1 and BR2).

### DETAILED DESCRIPTION

[0075] The present disclosure relates to novel compositions comprising CRISPR-Cas effector proteins and methods of use thereof. In some aspects, a composition comprising a CRISPR-Cas effector protein having one or more characteristics is described herein. In some aspects, a method of producing the composition is described. In some aspects, a method of delivering the composition is described.

### Class 2 CRISPR-Cas Effectors

[0076] In one aspect, the disclosure provides Class 2 CRISPR-Cas systems referred to herein as CLUST.018837. These Class 2 CRISPR-Cas systems contain an isolated CRISPR-associated protein having a RuvC domain.

[0077] In some embodiments, the CRISPR-associated protein and the RNA guide form a “binary” complex that may include other components. The binary complex is activated upon binding to a nucleic acid substrate that is complementary to a spacer sequence in the RNA guide (i.e., a sequence-specific substrate or target nucleic acid). In some embodiments, the sequence-specific substrate is a double-stranded DNA. In some embodiments, the sequence-specific substrate is a single-stranded DNA. In some embodiments, the sequence-specific substrate is a single-stranded RNA. In some embodiments, the sequence-specific substrate is a double-stranded RNA. In some embodiments, the sequence-specificity requires a complete match of the spacer sequence in the RNA guide (e.g., crRNA) to the target substrate. In other embodiments, the sequence specificity requires a partial (contiguous or non-contiguous) match of the spacer sequence in the RNA guide (e.g., crRNA) to the target substrate.

[0078] In some embodiments, the binary complex becomes activated upon binding to the target substrate. In some embodiments, the activated complex exhibits “multiple turnover” activity, whereby upon acting on (e.g., cleaving) the target substrate the activated complex remains in an activated state. In some embodiments, the activated binary complex exhibits “single turnover” activity, whereby upon acting on the target substrate the binary complex reverts to an inactive state. In some embodiments, the activated binary complex exhibits non-specific (i.e., “collateral”) cleavage activity whereby the complex cleaves non-target nucleic acids. In some embodiments, the non-target nucleic acid is a DNA (e.g., a single-stranded or a double-stranded DNA). In some embodiments, the non-target nucleic acid is an RNA (e.g., a single-stranded or a double-stranded RNA).

[0079] In some embodiments, the composition of the present invention includes a CRISPR-Cas effector protein described herein. A nucleic acid sequence encoding the CRISPR-Cas effector protein described herein may be substantially identical to a reference nucleic acid sequence if the nucleic acid encoding the CRISPR-Cas effector protein comprises a sequence having least about 60%, least about 65%, at least about 70%, at least about 75%, at least about 80%, at least about 85%, at least about 90%, at least about 91%, at least about 92%, at least about 93%, at least about 94%, at least about 95%, at least about 96%, at least about 97%, at least about 98%, at least about 99%, or at least about 99.5% sequence identity to the reference nucleic acid sequence. The percent identity between two such nucleic acids can be determined manually by inspection of the two optimally aligned nucleic acid sequences or by using software programs or algorithms (e.g., BLAST, ALIGN, CLUSTAL) using standard parameters. One indication that two nucleic acid sequences are substantially identical is that the two nucleic acid molecules hybridize to each other under stringent conditions (e.g., within a range of medium to high stringency).

[0080] In some embodiments, the CRISPR-Cas effector protein is encoded by a nucleic acid sequence having at least about 60%, least about 65%, at least about 70%, at least about 75%, at least about 80%, at least about 85%, at least about 90%, at least about 91%, at least about 92%, at least about 93%, at least about 94%, at least about 95%, at least about 96%, at least about 97%, at least about 98%, at least about 99%, or at least about 99.5% sequence identity to a reference nucleic acid sequence.

[0081] The CRISPR-Cas effector protein described herein may substantially identical to a reference polypeptide if the CRISPR-Cas effector protein comprises an amino acid sequence having at least about 60%, least about 65%, least about 70%, at least about 75%, at least about 80%, at least about 85%, at least about 90%, at least about 91%, at least about 92%, at least about 93%, at least about 94%, at least about 95%, at least about 96%, at least about 97%, at least about 98%, at least about 99%, or at least about 99.5% sequence identity to the amino acid sequence of the reference polypeptide. The percent identity between two such polypeptides can be determined manually by inspection of the two optimally aligned polypeptide sequences or by using software programs or algorithms (e.g., BLAST, ALIGN, CLUSTAL) using standard parameters. One indication that two polypeptides are substantially identical is that the first polypeptide is immunologically cross-reactive with the second polypeptide. Typically, polypeptides that differ by conservative amino acid substitutions are immunologically cross-reactive. Thus, a polypeptide is substantially identical to a second polypeptide, for example, where the two peptides differ only by a conservative amino acid substitution or one or more conservative amino acid substitutions.

[0082] In some embodiments, the CRISPR-Cas effector protein of the present invention comprises a polypeptide sequence having 50, 60, 65, 70, 75, 80, 85, 90, 91, 92, 93, 94, 95, 96, 97, 98, 99 or 100% identity to SEQ ID NO: 1. In some embodiments, the CRISPR-Cas effector protein of the present invention comprises a polypeptide sequence having greater than 50, 60, 65, 70, 75, 80, 85, 90, 91, 92, 93, 94, 95, 96, 97, 98, 99 or 100% identity to SEQ ID NO: 1.

[0083] In some embodiments, the CRISPR-Cas effector protein of the present invention comprises a polypeptide sequence having 50, 60, 65, 70, 75, 80, 85, 90, 91, 92, 93, 94, 95, 96, 97, 98, 99 or 100% identity to SEQ ID NO: 20. In some embodiments, the CRISPR-Cas effector protein of the present invention comprises a polypeptide sequence having greater than 50, 60, 65, 70, 75, 80, 85, 90, 91, 92, 93, 94, 95, 96, 97, 98, 99 or 100% identity to SEQ ID NO: 20.

[0084] In some embodiments, the CRISPR-Cas effector protein of the present invention comprises a polypeptide sequence having 50, 60, 65, 70, 75, 80, 85, 90, 91, 92, 93, 94, 95, 96, 97, 98, 99 or 100% identity to SEQ ID NO: 1057. In some embodiments, the CRISPR-Cas effector protein of the present invention comprises a polypeptide sequence having greater than 50, 60, 65, 70, 75, 80, 85, 90, 91, 92, 93, 94, 95, 96, 97, 98, 99 or 100% identity to SEQ ID NO: 1057.

[0085] In some embodiments, the CRISPR-Cas effector protein of the present invention comprises a polypeptide sequence having 50, 60, 65, 70, 75, 80, 85, 90, 91, 92, 93, 94, 95, 96, 97, 98, 99 or 100% identity to SEQ ID NO: 1058. In some embodiments, the CRISPR-Cas effector protein of the present invention comprises a polypeptide sequence having greater than 50, 60, 65, 70, 75, 80, 85, 90, 91, 92, 93, 94, 95, 96, 97, 98, 99 or 100% identity to SEQ ID NO: 1058.

[0086] In some embodiments, the CRISPR-Cas effector protein of the present invention comprises a polypeptide sequence having 50, 60, 65, 70, 75, 80, 85, 90, 91, 92, 93, 94, 95, 96, 97, 98, 99 or 100% identity to SEQ ID NO: 1059. In some embodiments, the CRISPR-Cas effector protein of the present invention comprises a polypeptide sequence having greater than 50, 60, 65, 70, 75, 80, 85, 90, 91, 92, 93, 94, 95, 96, 97, 98, 99 or 100% identity to SEQ ID NO: 1059.

[0087] In some embodiments, the CRISPR-Cas effector protein of the present invention comprises a polypeptide sequence having 50, 60, 65, 70, 75, 80, 85, 90, 91, 92, 93, 94, 95, 96, 97, 98, 99 or 100% identity to SEQ ID NO: 1060. In some embodiments, the CRISPR-Cas effector protein of the present invention comprises a polypeptide sequence having greater than 50, 60, 65, 70, 75, 80, 85, 90, 91, 92, 93, 94, 95, 96, 97, 98, 99 or 100% identity to SEQ ID NO: 1060.

[0088] In some embodiments, the CRISPR-Cas effector protein of the present invention comprises a polypeptide sequence having 50, 60, 65, 70, 75, 80, 85, 90, 91, 92, 93, 94, 95, 96, 97, 98, 99 or 100% identity to SEQ ID NO: 1061. In some embodiments, the CRISPR-Cas effector protein of the present invention comprises a polypeptide sequence having greater than 50, 60, 65, 70, 75, 80, 85, 90, 91, 92, 93, 94, 95, 96, 97, 98, 99 or 100% identity to SEQ ID NO: 1061.

[0089] In some embodiments, the CRISPR-Cas effector protein of the present invention comprises a polypeptide sequence having 50, 60, 65, 70, 75, 80, 85, 90, 91, 92, 93, 94, 95, 96, 97, 98, 99 or 100% identity to SEQ ID NO: 1062. In some embodiments, the CRISPR-Cas effector protein of the present invention comprises a polypeptide sequence having greater than 50, 60, 65, 70, 75, 80, 85, 90, 91, 92, 93, 94, 95, 96, 97, 98, 99 or 100% identity to SEQ ID NO: 1062.

[0090] In some embodiments, the CRISPR-Cas effector protein of the present invention comprises a polypeptide sequence having 50, 60, 65, 70, 75, 80, 85, 90, 91, 92, 93, 94, 95, 96, 97, 98, 99 or 100% identity to SEQ ID NO: 1063. In some embodiments, the CRISPR-Cas effector protein of the present invention comprises a polypeptide sequence having greater than 50, 60, 65, 70, 75, 80, 85, 90, 91, 92, 93, 94, 95, 96, 97, 98, 99 or 100% identity to SEQ ID NO: 1063.

[0091] In some embodiments, the CRISPR-Cas effector protein of the present invention comprises a polypeptide sequence having 50, 60, 65, 70, 75, 80, 85, 90, 91, 92, 93, 94, 95, 96, 97, 98, 99 or 100% identity to SEQ ID NO: 1064. In some embodiments, the CRISPR-Cas effector protein of the present invention comprises a polypeptide sequence having greater than 50, 60, 65, 70, 75, 80, 85, 90, 91, 92, 93, 94, 95, 96, 97, 98, 99 or 100% identity to SEQ ID NO: 1064.

[0092] In some embodiments, the CRISPR-Cas effector protein of the present invention comprises a polypeptide sequence having 50, 60, 65, 70, 75, 80, 85, 90, 91, 92, 93, 94, 95, 96, 97, 98, 99 or 100% identity to SEQ ID NO: 1065. In some embodiments, the CRISPR-Cas effector protein of the present invention comprises a polypeptide sequence having greater than 50, 60, 65, 70, 75, 80, 85, 90, 91, 92, 93, 94, 95, 96, 97, 98, 99 or 100% identity to SEQ ID NO: 1065.

[0093] In some embodiments, the CRISPR-Cas effector protein of the present invention comprises a polypeptide sequence having 50, 60, 65, 70, 75, 80, 85, 90, 91, 92, 93, 94, 95, 96, 97, 98, 99 or 100% identity to SEQ ID NO: 1066. In some embodiments, the CRISPR-Cas effector protein of the present invention comprises a polypeptide sequence having greater than 50, 60, 65, 70, 75, 80, 85, 90, 91, 92, 93, 94, 95, 96, 97, 98, 99 or 100% identity to SEQ ID NO: 1066.

[0094] In some embodiments, the CRISPR-Cas effector protein of the present invention is a CRISPR-Cas effector protein having a specified degree of amino acid sequence identity to one or more reference polypeptides, e.g., at least 60%, at least 65%, at least 70%, at least 75%, at least 80%, at least 85%, at least 90%, at least 91%, at least 92%, at least 93%, at least 94%, at least 95%, at least 96%, at least 97%, at least 98%, or even at least 99% sequence identity to the amino acid sequence of SEQ ID NO: 1 or SEQ ID NO: 20. Homology or identity can be determined by amino acid sequence alignment, e.g., using a program such as BLAST, ALIGN, or CLUSTAL, as described herein.

[0095] In some embodiments, the CRISPR-Cas effector protein comprises a protein with an amino acid sequence with at least about 60%, least about 65%, at least about 70%, at least about 75%, at least about 80%, at least about 85%, at least about 90%, at least about 91%, at least about 92%, at least about 93%, at least about 94%, at least about 95%, at least about 96%, at least about 97%, at least about 98%, at least about 99%, or at least about 99.5% sequence identity to the reference amino acid sequence.

[0096] Also provided is a CRISPR-Cas effector protein of the present invention and comprising an amino acid sequence which differs from the amino acid sequences of any one of SEQ ID NO: 1, SEQ ID NO: 20, SEQ ID NO: 1057, SEQ ID NO: 1058, SEQ ID NO: 1059, SEQ ID NO: 1060, SEQ ID NO: 1061, SEQ ID NO: 1062, SEQ ID NO: 1063, SEQ ID NO: 1064, SEQ ID NO: 1065, or SEQ ID NO: 1066 by no more than 50, no more than 40, no more than 35, no more than 30, no more than 25, no more than 20, no more than 19, no more than 18, no more than 17, no more than 16, no more than 15, no more than 14, no more than 13, no more than 12, no more than 11, no more than 10, no more than 9, no more than 8, no more than 7, no more than 6, no more than 5, no more than 4, no more than 3, no more than 2, or no more than 1 amino acid residue(s), when aligned using any of the previously described alignment methods.

[0097] In some embodiments, the CRISPR-Cas effector protein comprises a RuvC domain. In some embodiments, the CRISPR-Cas effector protein comprises a split RuvC domain or two or more (e.g., 3) partial RuvC domains. For example, the CRISPR-Cas effector protein comprises RuvC motifs that are not contiguous with respect to the primary amino acid sequence of the CRISPR-Cas effector protein but form a RuvC domain once the protein folds. In some embodiments, the catalytic residue of a RuvC motif is a histidine, glutamic acid residue, and/or an aspartic acid residue, including H297, D303, E311, E504, or D559 according to the numbering of SEQ ID NO: 1 or H300, D306, E332, E516, or D569 according to the numbering of SEQ ID NO: 20.

[0098] In some embodiments, the invention includes an isolated, recombinant, substantially pure, or non-naturally occurring CRISPR-Cas effector protein comprising a RuvC domain, wherein the CRISPR-Cas effector protein has enzymatic activity, e.g., nuclease or endonuclease activity, wherein the CRISPR-Cas effector protein comprises an amino acid sequence having at least about 60%, 65%, 70%, 75%, 80%, 85%, 86%, 87%, 88%, 89%, 90%, 91%, 92%, 93%, 94%, 95%, 96%, 97%, 98%, 99% or 100% sequence identity to SEQ ID NO: 1, SEQ ID NO: 20, SEQ ID NO: 1057, SEQ ID NO: 1058, SEQ ID NO: 1059, SEQ ID NO: 1060, SEQ ID NO: 1061, SEQ ID NO: 1062, SEQ ID NO: 1063, SEQ ID NO: 1064, SEQ ID NO: 1065, or SEQ ID NO: 1066.

[0099] In some embodiments, the invention includes a CRISPR-Cas effector protein comprising a mutated RuvC domain, wherein the CRISPR-Cas effector protein has modified enzymatic activity, e.g., nuclease or endonuclease activity, wherein the CRISPR-Cas effector protein comprises an amino acid sequence having at least about 60%, 65%, 70%, 75%, 80%, 85%, 86%, 87%, 88%, 89%, 90%, 91%, 92%, 93%, 94%, 95%, 96%, 97%, 98%, 99% or 100% sequence identity to SEQ ID NO: 1057, SEQ ID NO: 1058, SEQ ID NO: 1059, SEQ ID NO: 1060, SEQ ID NO: 1061, SEQ ID NO: 1062, SEQ ID NO: 1063, SEQ ID NO: 1064, SEQ ID NO: 1065, or SEQ ID NO: 1066.

### CRISPR Enzyme Modifications

[0100] Modified CRISPR Enzyme Activity

[0101] In some embodiments, the present invention includes variants of the nuclease described herein. In some embodiments, the nuclease described herein can be mutated at one or more amino acid residues to modify one or more functional activities. For example, in some embodiments, the nuclease is mutated at one or more amino acid residues to modify its nuclease activity (e.g., cleavage activity). For example, in some embodiments, the nuclease may comprise one or more mutations that increase the ability of the nuclease to cleave a target nucleic acid. In some embodiments, the nuclease is mutated at one or more amino acid residues to modify its ability to functionally associate with an RNA guide. In some embodiments, the nuclease is mutated at one or more amino acid residues to modify its ability to functionally associate with a target nucleic acid.

[0102] Where the CRISPR enzymes described herein have nuclease activity, the CRISPR enzymes can be modified to have diminished nuclease activity, e.g., nuclease inactivation of at least 50%, at least 60%, at least 70%, at least 80%, at least 90%, at least 95%, at least 97%, or 100% as compared with the wild type CRISPR enzymes. The nuclease activity can be diminished by several methods known in the art, e.g., introducing mutations into the nuclease domains of the proteins. In some embodiments, catalytic residues for the nuclease activities are identified, and these amino acid residues can be substituted by different amino acid residues (e.g., glycine or alanine) to diminish the nuclease activity. In some embodiments, a catalytic residue of a RuvC motif (RuvC I, RuvC II, or RuvC III) is mutated to decrease or inactivate nuclease activity. See, e.g., FIGS. 16B, 16F. In some embodiments, these nucleases are referred to as “RuvC inactivated,” RuvC diminished,” or “nuclease dead” proteins.

[0103] Where the CRISPR enzymes described herein have nuclease activity, the CRISPR enzymes can be modified to have increased nuclease activity, e.g., nuclease activation of at least 50%, at least 60%, at least 70%, at least 80%, at least 90%, at least 95%, at least 97%, or 100% as compared with the wild type CRISPR enzymes. The nuclease activity can be increased by several methods known in the art, e.g., introducing mutations into the nuclease domains of the proteins. In some embodiments, catalytic residues for the nuclease activities are identified, and these amino acid residues can be substituted by different amino acid residues (e.g., glycine or alanine) to increase or activate the nuclease activity. See, e.g., FIGS. 16C, 16I.

[0104] As used herein, a “biologically active portion” is a portion that maintains the function (e.g. completely, partially, minimally) of the nuclease (e.g., a “minimal” or “core” domain). In some embodiments, a nuclease fusion protein is useful in the methods described herein. Accordingly, in some embodiments, a nucleic acid encoding the fusion nuclease is described herein. In some embodiments, all or a portion of one or more components of the nuclease fusion protein are encoded in a single nucleic acid sequence.

[0105] In some embodiments, a variant nuclease has a conservative or non-conservative amino acid substitution, deletion or addition. In some embodiments, the variant nuclease has a silent substitution, deletion or addition, or a conservative substitution, none of which alter the polypeptide activity of the present invention. Typical examples of the conservative substitution include substitution whereby one amino acid is exchanged for another, such as exchange among aliphatic amino acids Ala, Val, Lu and Ile, exchange between hydroxyl residues Ser and Thr, exchange between acidic residues Asp and Glu, substitution between amide residues Asn and Gln, exchange between basic residues Lys and Arg, and substitution between aromatic residues Phe and Tyr. In some embodiments, one or more residues of a nuclease disclosed herein are mutated to an Arg residue. In some embodiments, one or more residues of a nuclease disclosed herein are mutated to a Gly residue.

[0106] A variety of methods are known in the art that are suitable for generating modified polynucleotides that encode variant nucleases of the invention, including, but not limited to, for example, site-saturation mutagenesis, scanning mutagenesis, insertional mutagenesis, deletion mutagenesis, random mutagenesis, site-directed mutagenesis, and directed-evolution, as well as various other recombinatorial approaches. Methods for making modified polynucleotides and proteins (e.g., nucleases) include DNA shuffling methodologies, methods based on non-homologous recombination of genes, such as ITCHY (See, Ostermeier et al., 7:2139-44 [1999]), SCRACHY (See, Lutz et al. 98:11248-53 [2001]), SHIPREC (See, Sieber et al., 19:456-60 [2001]), and NRR (See, Bittker et al., 20:1024-9 [2001]; Bittker et al., 101:7011-6 [2004]), and methods that rely on the use of oligonucleotides to insert random and targeted mutations, deletions and/or insertions (See, Ness et al., 20:1251-5 [2002]; Coco et al., 20:1246-50 [2002]; Zha et al., 4:34-9 [2003]; Glaser et al., 149:3903-13 [1992]).

[0107] Generation of Fusion Proteins

[0108] Additionally, nuclease dead CRISPR enzymes, whether in their native form or with mutations to modulate their nuclease activity, can provide a foundation from which fusion proteins with additional functional proteins can be created. The nuclease dead CRISPR enzymes can comprise or be associated (e.g., via fusion protein, linker peptides, and “GS” linkers) with one or more functional domains. These functional domains can have various activities, e.g., methylase activity, demethylase activity, transcription activation activity, transcription repression activity, transcription release factor activity, histone modification activity, RNA cleavage activity, DNA cleavage activity, nucleic acid binding activity, and switch activity (e.g., light inducible). In some embodiments, the functional domains are Krüppel associated box (KRAB), VP64, VP16, FokI, P65, HSF1, MyoD1, and biotin-APEX.

[0109] The positioning of the one or more functional domains on the nuclease dead CRISPR enzymes is one that allows for correct spatial orientation for the functional domain to affect the target with the attributed functional effect. For example, if the functional domain is a transcription activator (e.g., VP16, VP64, or p65), the transcription activator is placed in a spatial orientation that allows it to affect the transcription of the target. Likewise, a transcription repressor is positioned to affect the transcription of the target, and a nuclease (e.g., FokI) is positioned to cleave or partially cleave the target. In some embodiments, the functional domain is positioned at the N-terminus of the CRISPR enzyme. In some embodiments, the functional domain is positioned at the C-terminus of the CRISPR enzyme. In some embodiments, the inactivated CRISPR enzyme is modified to comprise a first functional domain at the N-terminus and a second functional domain at the C-terminus.

[0110] The addition of functional domains to the CRISPR enzymes or onto other effector proteins in the complex may provide an ability for the CRISPR-Cas system to modify the physical DNA (e.g., methylation, etc.) or its regulation (e.g., transcriptional or repression) in situ.

[0111] Split Enzymes

[0112] The present disclosure also provides a split version of the CRISPR enzymes described herein. The split version of the CRISPR enzymes may be advantageous for delivery. In some embodiments, the CRISPR enzymes are split to two parts of the enzymes, which together substantially comprises a functioning CRISPR enzyme.

[0113] The split can be done in a way that the catalytic domain(s) are unaffected. The CRISPR enzymes may function as a nuclease or may be inactivated enzymes, which are essentially RNA-binding proteins with very little or no catalytic activity (e.g., due to mutation(s) in its catalytic domains).

[0114] In some embodiments, the nuclease lobe and α-helical lobe are expressed as separate polypeptides. Although the lobes do not interact on their own, the RNA guide recruits them into a ternary complex that recapitulates the activity of full-length CRISPR enzymes and catalyzes site-specific DNA cleavage. The use of a modified RNA guide abrogates split-enzyme activity by preventing dimerization, allowing for the development of an inducible dimerization system. The split enzyme is described, e.g., in Wright, Addison V., et al. “Rational design of a split-Cas9 enzyme complex,” Proc. Nat'l. Acad. Sci., 112.10 (2015): 2984-2989, which is incorporated herein by reference in its entirety.

[0115] In some embodiments, the split enzyme can be fused to a dimerization partner, e.g., by employing rapamycin sensitive dimerization domains. This allows the generation of a chemically inducible CRISPR enzyme for temporal control of CRISPR enzyme activity. The CRISPR enzymes can thus be rendered chemically inducible by being split into two fragments and rapamycin-sensitive dimerization domains can be used for controlled reassembly of the CRISPR enzymes.

[0116] The split point is typically designed in silico and cloned into the constructs. During this process, mutations can be introduced to the split enzyme and non-functional domains can be removed. In some embodiments, the two parts or fragments of the split CRISPR enzyme (i.e., the N-terminal and C-terminal fragments), can form a full CRISPR enzyme, comprising, e.g., at least 70%, at least 80%, at least 90%, at least 95%, or at least 99% of the sequence of the wild-type CRISPR enzyme.

[0117] Self-Activating or Inactivating Enzymes

[0118] The CRISPR enzymes described herein can be designed to be self-activating or self-inactivating. In some embodiments, the CRISPR enzymes are self-inactivating. For example, the target sequence can be introduced into the CRISPR enzyme coding constructs. Thus, the CRISPR enzymes can modify, e.g., cleave, the target sequence, as well as the construct encoding the enzyme thereby self-inactivating their expression. Methods of constructing a self-inactivating CRISPR-Cas system is described, e.g., in Epstein, Benjamin E., and David V. Schaffer. “Engineering a Self-Inactivating CRISPR-Cas System for AAV Vectors,” Mol. Ther., 24 (2016): S50, which is incorporated herein by reference in its entirety.

[0119] In some other embodiments, an additional RNA guide, expressed under the control of a weak promoter (e.g., 7SK promoter), can target the nucleic acid sequence encoding the CRISPR enzyme to prevent and/or block its expression (e.g., by preventing the transcription and/or translation of the nucleic acid). The transfection of cells with vectors expressing the CRISPR enzyme, and RNA guides that target the nucleic acid encoding the CRISPR enzyme can lead to efficient disruption of the nucleic acid encoding the CRISPR enzyme and decrease the levels of CRISPR enzyme, thereby limiting the genome editing activity.

[0120] In some embodiments, the genome editing activity of the CRISPR enzymes can be modulated through endogenous RNA signatures (e.g., miRNA) in mammalian cells. The CRISPR enzyme switch can be made by using a miRNA-complementary sequence in the 5′-UTR of mRNA encoding the CRISPR enzyme. The switches selectively and efficiently respond to miRNA in the target cells. Thus, the switches can differentially control the genome editing by sensing endogenous miRNA activities within a heterogeneous cell population. Therefore, the switch systems can provide a framework for cell-type selective genome editing and cell engineering based on intracellular miRNA information (Hirosawa, Moe et al. “Cell-type-specific genome editing with a microRNA-responsive CRISPR-Cas9 switch,” Nucl. Acids Res., 2017 Jul. 27; 45(13): e118).

[0121] Inducible CRISPR Enzymes

[0122] The CRISPR enzymes can be inducible, e.g., light inducible or chemically inducible. This mechanism allows for activation of the functional domain in the CRISPR enzymes. Light inducibility can be achieved by various methods known in the art, e.g., by designing a fusion complex wherein CRY2PHR/CIBN pairing is used in split CRISPR Enzymes (see, e.g., Konermann et al. “Optical control of mammalian endogenous transcription and epigenetic states,” Nature, 500.7463 (2013): 472). Chemical inducibility can be achieved, e.g., by designing a fusion complex wherein FKBP/FRB (FK506 binding protein/FKBP rapamycin binding domain) pairing is used in split CRISPR Enzymes. Rapamycin is required for forming the fusion complex, thereby activating the CRISPR enzymes (see, e.g., Zetsche, Volz, and Zhang, “A split-Cas9 architecture for inducible genome editing and transcription modulation,” Nature Biotech., 33.2 (2015): 139-142).

[0123] Furthermore, expression of the CRISPR enzymes can be modulated by inducible promoters, e.g., tetracycline or doxycycline controlled transcriptional activation (Tet-On and Tet-Off expression system), hormone inducible gene expression system (e.g., an ecdysone inducible gene expression system), and an arabinose-inducible gene expression system. When delivered as RNA, expression of the RNA targeting effector protein can be modulated via a riboswitch, which can sense a small molecule like tetracycline (see, e.g., Goldfless, Stephen J. et al. “Direct and specific chemical control of eukaryotic translation with a synthetic RNA-protein interaction,” Nuc. Acids Res., 40.9 (2012): e64-e64).

[0124] Various embodiments of inducible CRISPR enzymes and inducible CRISPR-Cas systems are described, e.g., in U.S. Pat. No. 8,871,445, US20160208243, and WO2016205764, each of which is incorporated herein by reference in its entirety.

[0125] Functional Mutations

[0126] Various mutations or modifications can be introduced into CRISPR enzymes as described herein to improve specificity and/or robustness. In some embodiments, the amino acid residues that recognize the Protospacer Adjacent Motif (PAM) are identified. The CRISPR enzymes described herein can be modified further to recognize different PAMs, e.g., by substituting the amino acid residues that recognize PAM with other amino acid residues. In some embodiments, the CRISPR enzymes can recognize a PAM, e.g., 5′-TTN-3′ or 5′-YTN-3′, wherein N is any nucleobase and Y is cytosine or thymine.

[0127] In some embodiments, at least one Nuclear Localization Signal (NLS) is attached to the nucleic acid sequences encoding the CRISPR enzyme. In some embodiments, at least one Nuclear Export Signal (NES) is attached to the nucleic acid sequences encoding the CRISPR enzyme. In a preferred embodiment a C-terminal and/or N-terminal NLS or NES is attached for optimal expression and nuclear targeting in eukaryotic cells, e.g., human cells.

[0128] In some embodiments, the CRISPR enzyme is mutated at one or more amino acid residues to alter its ability to functionally associate with an RNA guide. In some embodiments, the CRISPR enzyme is mutated at one or more amino acid residues to alter its ability to functionally associate with a target nucleic acid.

[0129] In some embodiments, the CRISPR enzymes described herein are capable of binding to or modifying a target nucleic acid molecule. In some embodiments, the CRISPR enzyme modifies both strands of the target nucleic acid molecule. However, in some embodiments, the CRISPR enzyme is mutated at one or more amino acid residues to alter its nucleic acid manipulation activity. For example, in some embodiments, the CRISPR enzyme may comprise one or more mutations which render the enzyme incapable of cleaving a target nucleic acid. In other embodiments, the CRISPR enzyme may comprise one or more mutations such that the enzyme is capable of cleaving a single strand of the target nucleic acid (i.e., nickase activity). In some embodiments, the CRISPR enzyme is capable of cleaving the strand of the target nucleic acid that is complementary to the strand to which the RNA guide hybridizes. In some embodiments, the CRISPR enzyme is capable of cleaving the strand of the target nucleic acid to which the RNA guide hybridizes.

[0130] In some embodiments, a CRISPR enzyme described herein may be engineered to comprise a deletion in one or more amino acid residues to reduce the size of the enzyme while retaining one or more desired functional activities (e.g., nuclease activity and the ability to interact functionally with an RNA guide). The truncated CRISPR enzyme may be advantageously used in combination with delivery systems having load limitations.

[0131] Nucleic Acids Encoding the CRISPR-Associated Proteins

[0132] Nucleic acids encoding the proteins (e.g., a CRISPR-associated protein) and RNA guides (e.g., a crRNA) described herein are also provided. In some embodiments, the nucleic acid is a synthetic nucleic acid. In some embodiments, the nucleic acid is a DNA molecule. In some embodiments, the nucleic acid is an RNA molecule (e.g., an mRNA molecule). In some embodiments, the nucleic acid is an mRNA. In some embodiments, the mRNA is capped, polyadenylated, substituted with 5-methylcytidine, substituted with pseudouridine, or a combination thereof. In some embodiments, the nucleic acid (e.g., DNA) is operably-linked to a regulatory element (e.g., a promoter) to control the expression of the nucleic acid. In some embodiments, the promoter is a constitutive promoter. In some embodiments, the promoter is an inducible promoter. In some embodiments, the promoter is a cell-specific promoter. In some embodiments, the promoter is an organism-specific promoter. Suitable promoters are known in the art and include, for example, a pol I promoter, a pol II promoter, a pol III promoter, a T7 promoter, a U6 promoter, a H1 promoter, retroviral Rous sarcoma virus LTR promoter, a cytomegalovirus (CMV) promoter, a SV40 promoter, a dihydrofolate reductase promoter, and a β-actin promoter. For example, a U6 promoter can be used to regulate the expression of an RNA guide molecule described herein.

[0133] In some embodiments, the nucleic acids are modified, e.g., optimized, e.g., codon-optimized, for expression in a eukaryotic cell, e.g., a mammalian cell, such as a human cell.

[0134] In some embodiments, the nucleic acid(s) are present in a vector (e.g., a viral vector or a phage). The vectors can include one or more regulatory elements that allow for the propagation of the vector in a cell of interest (e.g., a bacterial cell or a mammalian cell). In some embodiments, the vector includes a nucleic acid encoding a single component of a CRISPR-associated (Cas) system described herein. In some embodiments, the vector includes multiple nucleic acids, each encoding a component of a CRISPR-associated (Cas) system described herein.

### RNA Guide Modifications

[0135] Spacer Lengths

[0136] The spacer length of RNA guides can range from about 15 to 50 nucleotides. In some embodiments, the spacer length of an RNA guide is at least 16 nucleotides, at least 17 nucleotides, at least 18 nucleotides, at least 19 nucleotides, at least 20 nucleotides, at least 21 nucleotides, or at least 22 nucleotides. In some embodiments, the spacer length is from 15 to 17 nucleotides, from 15 to 23 nucleotides, from 16 to 22 nucleotides, from 17 to 20 nucleotides, from 20 to 24 nucleotides (e.g., 20, 21, 22, 23, or 24 nucleotides), from 23 to 25 nucleotides (e.g., 23, 24, or 25 nucleotides), from 24 to 27 nucleotides, from 27 to 30 nucleotides, from 30 to 45 nucleotides (e.g., 30, 31, 32, 33, 34, 35, 40, or 45 nucleotides), from 30 or 35 to 40 nucleotides, from 41 to 45 nucleotides, from 45 to 50 nucleotides, or longer. In some embodiments, the direct repeat length of the RNA guide is at least 16 nucleotides, or is from 16 to 20 nucleotides (e.g., 16, 17, 18, 19, or 20 nucleotides). In some embodiments, the direct repeat length of the RNA guide is 19 nucleotides.

[0137] Exemplary RNA guide direct repeat sequences and effector protein pairs are provided in Table 3. In some embodiments, the RNA guide includes a direct repeat sequence comprising or consisting of a nucleic acid sequence listed in Table 3 (e.g., SEQ ID Nos: 27-47, 263-440).

[0138] The RNA guide sequences can be modified in a manner that allows for formation of the CRISPR complex and successful binding to the target, while at the same time not allowing for successful effector activity (i.e., without nuclease activity/without causing indels). These modified guide sequences are referred to as “dead guides” or “dead guide sequences.” These dead guides or dead guide sequences may be catalytically inactive or conformationally inactive with regard to nuclease activity. Dead guide sequences are typically shorter than respective guide sequences that result in active DNA modification. In some embodiments, dead guides are 5%, 10%, 20%, 30%, 40%, or 50%, shorter than respective RNA guides that have nuclease activity. Dead guide sequences of RNA guides can be from 13 to 15 nucleotides in length (e.g., 13, 14, or 15 nucleotides in length), from 15 to 19 nucleotides in length, or from 17 to 18 nucleotides in length (e.g., 17 nucleotides in length).

[0139] Thus, in one aspect, the disclosure provides non-naturally occurring or engineered CRISPR-Cas systems including a functional CRISPR enzyme as described herein, and an RNA guide wherein the RNA guide includes a dead guide sequence whereby the RNA guide is capable of hybridizing to a target sequence such that the CRISPR-Cas system is directed to a genomic locus of interest in a cell without detectable nucleic acid modification activity.

[0140] A detailed description of dead guides is described, e.g., in WO 2016094872, which is incorporated herein by reference in its entirety.

[0141] Inducible Guides

[0142] RNA guides can be generated as components of inducible systems. The inducible nature of the systems allows for spatiotemporal control of gene editing or gene expression. In some embodiments, the stimuli for the inducible systems include, e.g., electromagnetic radiation, sound energy, chemical energy, and/or thermal energy.

[0143] In some embodiments, the transcription of RNA guides can be modulated by inducible promoters, e.g., tetracycline or doxycycline controlled transcriptional activation (Tet-On and Tet-Off expression systems), hormone inducible gene expression systems (e.g., ecdysone inducible gene expression systems), and arabinose-inducible gene expression systems. Other examples of inducible systems include, e.g., small molecule two-hybrid transcription activations systems (FKBP, ABA, etc.), light inducible systems (Phytochrome, LOV domains, or cryptochrome), or Light Inducible Transcriptional Effector (LITE). These inducible systems are described, e.g., in WO 2016205764 and U.S. Pat. No. 8,795,965, both of which are incorporated herein by reference in their entirety.

[0144] Chemical Modifications

[0145] Chemical modifications can be applied to the RNA guide's phosphate backbone, sugar, and/or base. Backbone modifications such as phosphorothioates modify the charge on the phosphate backbone and aid in the delivery and nuclease resistance of the oligonucleotide (see, e.g., Eckstein, “Phosphorothioates, essential components of therapeutic oligonucleotides,” Nucl. Acid Ther., 24 (2014), pp. 374-387); modifications of sugars, such as 2′-O-methyl (2′-OMe), 2′-F, and locked nucleic acid (LNA), enhance both base pairing and nuclease resistance (see, e.g., Allerson et al. “Fully 2′-modified oligonucleotide duplexes with improved in vitro potency and stability compared to unmodified small interfering RNA,” J. Med. Chem., 48.4 (2005): 901-904). Chemically modified bases such as 2-thiouridine or N6-methyladenosine, among others, can allow for either stronger or weaker base pairing (see, e.g., Bramsen et al., “Development of therapeutic-grade small interfering RNAs by chemical engineering,” Front. Genet., 2012 Aug. 20; 3:154). Additionally, RNA is amenable to both 5′ and 3′ end conjugations with a variety of functional moieties including fluorescent dyes, polyethylene glycol, or proteins.

[0146] A wide variety of modifications can be applied to chemically synthesized RNA guide molecules. For example, modifying an oligonucleotide with a 2′-OMe to improve nuclease resistance can change the binding energy of Watson-Crick base pairing. Furthermore, a 2′-OMe modification can affect how the oligonucleotide interacts with transfection reagents, proteins or any other molecules in the cell. The effects of these modifications can be determined by empirical testing.

[0147] In some embodiments, the RNA guide includes one or more phosphorothioate modifications. In some embodiments, the RNA guide includes one or more locked nucleic acids for the purpose of enhancing base pairing and/or increasing nuclease resistance.

[0148] A summary of these chemical modifications can be found, e.g., in Kelley et al., “Versatility of chemically synthesized guide RNAs for CRISPR-Cas9 genome editing,” J. Biotechnol. 2016 Sep. 10; 233:74-83; WO 2016205764; and U.S. Pat. No. 8,795,965 B2; each which is incorporated by reference in its entirety.

[0149] Sequence Modifications

[0150] The sequences and the lengths of the RNA guides described herein can be optimized. In some embodiments, the optimized length of RNA guide can be determined by identifying the processed form of tracrRNA and/or crRNA, or by empirical length studies for guide RNAs, tracrRNAs, crRNAs, and the tracrRNA tetraloops.

[0151] The RNA guides can also include one or more aptamer sequences. Aptamers are oligonucleotide or peptide molecules that can bind to a specific target molecule. The aptamers can be specific to gene effectors, gene activators, or gene repressors. In some embodiments, the aptamers can be specific to a protein, which in turn is specific to and recruits/binds to specific gene effectors, gene activators, or gene repressors. The effectors, activators, or repressors can be present in the form of fusion proteins. In some embodiments, the RNA guide has two or more aptamer sequences that are specific to the same adaptor proteins. In some embodiments, the two or more aptamer sequences are specific to different adaptor proteins. The adaptor proteins can include, e.g., MS2, PP7, Qβ, F2, GA, fr, JP501, M12, R17, BZ13, JP34, JP500, KU1, M11, MX1, TW18, VK, SP, FI, ID2, NL95, TW19, AP205, φCb5, φCb8r, φCb12r, φCb23r, 7s, and PRR1. Accordingly, in some embodiments, the aptamer is selected from binding proteins specifically binding any one of the adaptor proteins as described herein. In some embodiments, the aptamer sequence is a MS2 loop. A detailed description of aptamers can be found, e.g., in Nowak et al., “Guide RNA engineering for versatile Cas9 functionality,” Nucl. Acid. Res., 2016 Nov. 16; 44(20):9555-9564; and WO 2016205764, which are incorporated herein by reference in their entirety.

[0152] Guide: Target Sequence Matching Requirements

[0153] In classic CRISPR-Cas systems, the degree of complementarity between a guide sequence and its corresponding target sequence can be about 50%, 60%, 75%, 80%, 85%, 90%, 95%, 97.5%, 99%, or 100%. In some embodiments, the degree of complementarity is 100%. The RNA guides can be about 5, 10, 11, 12, 13, 14, 15, 16, 17, 18, 19, 20, 21, 22, 23, 24, 25, 26, 27, 28, 29, 30, 35, 40, 45, 50, 75, or more nucleotides in length.

[0154] To reduce off-target interactions, e.g., to reduce the guide interacting with a target sequence having low complementarity, mutations can be introduced to the CRISPR-Cas systems so that the CRISPR-Cas systems can distinguish between target and off-target sequences that have greater than 80%, 85%, 90%, or 95% complementarity. In some embodiments, the degree of complementarity is from 80% to 95%, e.g., about 83%, 84%, 85%, 86%, 87%, 88%, 89%, 90%, 91%, 92%, 93%, 94%, or 95% (for example, distinguishing between a target having 18 nucleotides from an off-target of 18 nucleotides having 1, 2, or 3 mismatches). Accordingly, in some embodiments, the degree of complementarity between a guide sequence and its corresponding target sequence is greater than 94.5%, 95%, 95.5%, 96%, 96.5%, 97%, 97.5%, 98%, 98.5%, 99%, 99.5%, or 99.9%. In some embodiments, the degree of complementarity is 100%.

[0155] It is known in the field that complete complementarity is not required provided that there is sufficient complementarity to be functional. For CRISPR nucleases, modulation of cleavage efficiency can be exploited by introduction of mismatches, e.g., one or more mismatches, such as 1 or 2 mismatches between spacer sequence and target sequence, including the position of the mismatch along the spacer/target. The more central (i.e., not at the 3′ or 5′ ends) a mismatch, e.g., a double mismatch, is located; the more cleavage efficiency is affected. Accordingly, by choosing mismatch positions along the spacer sequence, cleavage efficiency can be modulated. For example, if less than 100% cleavage of targets is desired (e.g., in a cell population), 1 or 2 mismatches between spacer and target sequence can be introduced in the spacer sequences.

### Methods of Using CRISPR-Cas Systems

[0156] The CRISPR-Cas systems described herein have a wide variety of utilities including modifying (e.g., deleting, inserting, translocating, inactivating, or activating) a target polynucleotide in a multiplicity of cell types. The CRISPR-Cas systems have a broad spectrum of applications in, e.g., DNA/RNA detection (e.g., specific high sensitivity enzymatic reporter unlocking (SHERLOCK)), tracking and labeling of nucleic acids, enrichment assays (extracting desired sequence from background), detecting circulating tumor DNA, preparing next generation library, drug screening, disease diagnosis and prognosis, and treating various genetic diseases or disorders, and treating various non-genetic diseases or disorders, or augmenting health via manipulation of the genome.

[0157] DNA/RNA Detection

[0158] In one aspect, the CRISPR-Cas systems described herein can be used in DNA/RNA detection. Single effector RNA-guided DNases can be reprogrammed with CRISPR RNAs (crRNAs) to provide a platform for specific single-stranded DNA (ssDNA) sensing. Upon recognition of its DNA target, activated Type V single effector DNA-guided DNases engage in “collateral” cleavage of nearby non-targeted ssDNAs. This crRNA-programmed collateral cleavage activity allows the CRISPR-Cas systems to detect the presence of a specific DNA by nonspecific degradation of labeled ssDNA.

[0159] The collateral ssDNA activity can be combined with a reporter in DNA detection applications such as a method called the DNA Endonuclease-Targeted CRISPR trans reporter (DETECTR) method, which achieves attomolar sensitivity for DNA detection (see, e.g., Chen et al., Science, 360(6387):436-439, 2018), which is incorporated herein by reference in its entirety. One application of using the enzymes described herein is to degrade non-specific ssDNA in an in vitro environment. A “reporter” ssDNA molecule linking a fluorophore and a quencher can also be added to the in vitro system, along with an unknown sample of DNA (either single-stranded or double-stranded). Upon recognizing the target sequence in the unknown piece of DNA, the effector complex cleaves the reporter ssDNA resulting in a fluorescent readout.

[0160] In other embodiments, the SHERLOCK method (Specific High Sensitivity Enzymatic Reporter UnLOCKing) also provides an in vitro nucleic acid detection platform with attomolar (or single-molecule) sensitivity based on nucleic acid amplification and collateral cleavage of a reporter ssDNA, allowing for real-time detection of the target. Methods of using CRISPR in SHERLOCK are described in detail, e.g., in Gootenberg, et al. “Nucleic acid detection with CRISPR-Cas13a/C2c2,” Science, 356(6336):438-442 (2017), which is incorporated herein by reference in its entirety.

[0161] In some embodiments, the CRISPR-Cas systems described herein can be used in multiplexed error-robust fluorescence in situ hybridization (MERFISH). These methods are described in, e.g., Chen et al., “Spatially resolved, highly multiplexed RNA profiling in single cells,” Science, 2015 Apr. 24; 348(6233):aaa6090, which is incorporated herein by reference in its entirety.

[0162] Tracking and Labeling of Nucleic Acids

[0163] Cellular processes depend on a network of molecular interactions among proteins, RNAs, and DNAs. Accurate detection of protein-DNA and protein-RNA interactions is key to understanding such processes. In vitro proximity labeling techniques employ an affinity tag combined with, a reporter group, e.g., a photoactivatable group, to label polypeptides and RNAs in the vicinity of a protein or RNA of interest in vitro. After UV irradiation, the photoactivatable groups react with proteins and other molecules that are in close proximity to the tagged molecules, thereby labelling them. Labelled interacting molecules can subsequently be recovered and identified. The RNA targeting effector proteins can for instance be used to target probes to selected RNA sequences. These applications can also be applied in animal models for in vivo imaging of diseases or difficult-to culture cell types. The methods of tracking and labeling of nucleic acids are described, e.g., in U.S. Pat. No. 8,795,965; WO 2016205764; and WO 2017070605; each of which is incorporated herein by reference in its entirety.

[0164] High-Throughput Screening

[0165] The CRISPR-Cas systems described herein can be used for preparing next generation sequencing (NGS) libraries. For example, to create a cost-effective NGS library, the CRISPR-Cas systems can be used to disrupt the coding sequence of a target gene, and the CRISPR enzyme transfected clones can be screened simultaneously by next-generation sequencing (e.g., on an Illumina system). A detailed description regarding how to prepare NGS libraries can be found, e.g., in Bell et al., “A high-throughput screening strategy for detecting CRISPR-Cas9 induced mutations using next-generation sequencing,” BMC Genomics, 15.1 (2014): 1002, which is incorporated herein by reference in its entirety.

[0166] Engineered Microorganisms

[0167] Microorganisms (e.g., E. coli, yeast, and microalgae) are widely used for synthetic biology. The development of synthetic biology has a wide utility, including various clinical applications. For example, the programmable CRISPR-Cas systems can be used to split proteins of toxic domains for targeted cell death, e.g., using cancer-linked RNA as target transcript. Further, pathways involving protein-protein interactions can be influenced in synthetic biological systems with e.g. fusion complexes with the appropriate effectors such as kinases or enzymes.

[0168] In some embodiments, RNA guide sequences that target phage sequences can be introduced into the microorganism. Thus, the disclosure also provides methods of vaccinating a microorganism (e.g., a production strain) against phage infection.

[0169] In some embodiments, the CRISPR-Cas systems provided herein can be used to engineer microorganisms, e.g., to improve yield or improve fermentation efficiency. For example, the CRISPR-Cas systems described herein can be used to engineer microorganisms, such as yeast, to generate biofuel or biopolymers from fermentable sugars, or to degrade plant-derived lignocellulose derived from agricultural waste as a source of fermentable sugars. More particularly, the methods described herein can be used to modify the expression of endogenous genes required for biofuel production and/or to modify endogenous genes, which may interfere with the biofuel synthesis. These methods of engineering microorganisms are described e.g., in Verwaal et al., “CRISPR/Cpf1 enables fast and simple genome editing of Saccharomyces cerevisiae,” Yeast, 2017 Sep. 8. doi: 10.1002/yea.3278; and Hlavova et al., “Improving microalgae for biotechnology—from genetics to synthetic biology,” Biotechnol. Adv., 2015 Nov. 1; 33:1194-203, both of which are incorporated herein by reference in their entirety.

[0170] Application in Plants

[0171] The CRISPR-Cas systems described herein have a wide variety of utility in plants. In some embodiments, the CRISPR-Cas systems can be used to engineer genomes of plants (e.g., improving production, making products with desired post-translational modifications, or introducing genes for producing industrial products). In some embodiments, the CRISPR-Cas systems can be used to introduce a desired trait to a plant (e.g., with or without heritable modifications to the genome), or regulate expression of endogenous genes in plant cells or whole plants.

[0172] In some embodiments, the CRISPR-Cas systems can be used to identify, edit, and/or silence genes encoding specific proteins, e.g., allergenic proteins (e.g., allergenic proteins in peanuts, soybeans, lentils, peas, green beans, and mung beans). A detailed description regarding how to identify, edit, and/or silence genes encoding proteins is described, e.g., in Nicolaou et al., “Molecular diagnosis of peanut and legume allergy,” Curr. Opin. Allergy Clin. Immunol., 11(3):222-8 (2011), and WO 2016205764 A1; both of which are incorporated herein by reference in their entirety.

[0173] Gene Drives

[0174] Gene drive is the phenomenon in which the inheritance of a particular gene or set of genes is favorably biased. The CRISPR-Cas systems described herein can be used to build gene drives. For example, the CRISPR-Cas systems can be designed to target and disrupt a particular allele of a gene, causing the cell to copy the second allele to fix the sequence. Because of the copying, the first allele will be converted to the second allele, increasing the chance of the second allele being transmitted to the offspring. A detailed method regarding how to use the CRISPR-Cas systems described herein to build gene drives is described, e.g., in Hammond et al., “A CRISPR-Cas9 gene drive system targeting female reproduction in the malaria mosquito vector Anopheles gambiae,” Nat. Biotechnol., 2016 January; 34(1):78-83, which is incorporated herein by reference in its entirety.

[0175] Pooled-Screening

[0176] As described herein, pooled CRISPR screening is a powerful tool for identifying genes involved in biological mechanisms such as cell proliferation, drug resistance, and viral infection. Cells are transduced in bulk with a library of RNA guide-encoding vectors described herein, and the distribution of RNA guides is measured before and after applying a selective challenge. Pooled CRISPR screens work well for mechanisms that affect cell survival and proliferation, and they can be extended to measure the activity of individual genes (e.g., by using engineered reporter cell lines). Arrayed CRISPR screens, in which only one gene is targeted at a time, make it possible to use RNA-seq as the readout. In some embodiments, the CRISPR-Cas systems as described herein can be used in single-cell CRISPR screens. A detailed description regarding pooled CRISPR screenings can be found, e.g., in Datlinger et al., “Pooled CRISPR screening with single-cell transcriptome read-out,” Nat. Methods., 2017 March; 14(3):297-301, which is incorporated herein by reference in its entirety.

[0177] Saturadon Mutagenesis (“Bashing”)

[0178] The CRISPR-Cas systems described herein can be used for in situ saturating mutagenesis. In some embodiments, a pooled RNA guide library can be used to perform in situ saturating mutagenesis for particular genes or regulatory elements. Such methods can reveal critical minimal features and discrete vulnerabilities of these genes or regulatory elements (e.g., enhancers). These methods are described, e.g., in Canver et al., “BCL11A enhancer dissection by Cas9-mediated in situ saturating mutagenesis,” Nature, 2015 Nov. 12; 527(7577):192-7, which is incorporated herein by reference in its entirety.

[0179] Quantitative Trait Mapping (crisprQTL)

[0180] The CRISPR-Cas systems described herein can be used for mapping coding and non-coding regions of a genome that influence gene expression. For example, in some embodiments, a population of cells may be transduced with multiple random, barcoded, CRISPR guide RNA-programmed perturbations in each cell. Single-cell RNA-sequencing may then be used to profile gene expression and the collection of RNA guides in each cell. The generated data can then be used to identify associations between RNA guides and quantitative changes in gene expression, which facilitates the analysis of the cis-regulatory architecture of the cells. These methods are described, for example, in Gasperini et al., “crisprQTL mapping as a genome-wide association framework for cellular genetic screens,” bioRxiv 314344, posted May 4, 2018, doi: doi.org/10.1101/314344, which is incorporated herein by reference in its entirety.

[0181] Therapeutic Applications

[0182] The CRISPR-Cas systems described herein can have various therapeutic applications. In some embodiments, the new CRISPR-Cas systems can be used to treat various diseases and disorders, e.g., genetic disorders (e.g., monogenetic diseases), diseases that can be treated by nuclease activity (e.g., Pcsk9 targeting, Duchenne Muscular Dystrophy (DMD), BCL11a targeting), and various cancers, etc.

[0183] In some embodiments, the CRISPR-Cas systems described herein can be used to edit a target nucleic acid to modify the target nucleic acid (e.g., by inserting, deleting, or mutating one or more amino acid residues). For example, in some embodiments the CRISPR-Cas systems described herein comprise an exogenous donor template nucleic acid (e.g., a DNA molecule or an RNA molecule), which comprises a desirable nucleic acid sequence. Upon resolution of a cleavage event induced with the CRISPR-Cas system described herein, the molecular machinery of the cell utilizes the exogenous donor template nucleic acid in repairing and/or resolving the cleavage event. Alternatively, the molecular machinery of the cell can utilize an endogenous template in repairing and/or resolving the cleavage event. In some embodiments, the CRISPR-Cas systems described herein may be used to alter a target nucleic acid resulting in an insertion, a deletion, and/or a point mutation). In some embodiments, the insertion is a scarless insertion (i.e., the insertion of an intended nucleic acid sequence into a target nucleic acid resulting in no additional unintended nucleic acid sequence upon resolution of the cleavage event). Donor template nucleic acids may be double stranded or single stranded nucleic acid molecules (e.g., DNA or RNA). Methods of designing exogenous donor template nucleic acids are described, for example, in PCT Publication No. WO 2016094874 A1, the entire contents of which are expressly incorporated herein by reference.

[0184] In one aspect, the CRISPR-Cas systems described herein can be used for treating a disease caused by overexpression of RNAs, toxic RNAs, and/or mutated RNAs (e.g., splicing defects or truncations). For example, expression of the toxic RNAs may be associated with the formation of nuclear inclusions and late-onset degenerative changes in brain, heart, or skeletal muscle. In some embodiments, the disorder is myotonic dystrophy. In myotonic dystrophy, the main pathogenic effect of the toxic RNAs is to sequester binding proteins and compromise the regulation of alternative splicing (see, e.g., Osborne et al., “RNA-dominant diseases,” Hum. Mol. Genet., 2009 Apr. 15; 18(8):1471-81). Myotonic dystrophy (dystrophia myotonica (DM)) is of particular interest to geneticists because it produces an extremely wide range of clinical features. The classical form of DM, which is now called DM type 1 (DM1), is caused by an expansion of CTG repeats in the 3′-untranslated region (UTR) of DMPK, a gene encoding a cytosolic protein kinase. The CRISPR-Cas systems as described herein can target overexpressed RNA or toxic RNA, e.g., the DMPK gene or any of the mis-regulated alternative splicing in DM1 skeletal muscle, heart, or brain.

[0185] The CRISPR-Cas systems described herein can also target trans-acting mutations affecting RNA-dependent functions that cause various diseases such as, e.g., Prader Willi syndrome, Spinal muscular atrophy (SMA), and Dyskeratosis congenita. A list of diseases that can be treated using the CRISPR-Cas systems described herein is summarized in Cooper et al., “RNA and disease,” Cell, 136.4 (2009): 777-793, and WO 2016205764 A1, both of which are incorporated herein by reference in their entirety. Those of skill in this field will understand how to use the new CRISPR-Cas systems to treat these diseases.

[0186] The CRISPR-Cas systems described herein can also be used in the treatment of various tauopathies, including, e.g., primary and secondary tauopathies, such as primary age-related tauopathy (PART)/Neurofibrillary tangle (NFT)-predominant senile dementia (with NFTs similar to those seen in Alzheimer Disease (AD), but without plaques), dementia pugilistica (chronic traumatic encephalopathy), and progressive supranuclear palsy. A useful list of tauopathies and methods of treating these diseases are described, e.g., in WO 2016205764, which is incorporated herein by reference in its entirety.

[0187] The CRISPR-Cas systems described herein can also be used to target mutations disrupting the cis-acting splicing codes that can cause splicing defects and diseases. These diseases include, e.g., motor neuron degenerative disease that results from deletion of the SMN1 gene (e.g., spinal muscular atrophy), Duchenne Muscular Dystrophy (DMD), frontotemporal dementia, and Parkinsonism linked to chromosome 17 (FTDP-17), and cystic fibrosis.

[0188] The CRISPR-Cas systems described herein can further be used for antiviral activity, in particular against RNA viruses. The effector proteins can target the viral RNAs using suitable RNA guides selected to target viral RNA sequences.

[0189] Furthermore, in vitro RNA sensing assays can be used to detect specific RNA substrates. The RNA targeting effector proteins can be used for RNA-based sensing in living cells. Examples of applications are diagnostics by sensing of, for examples, disease-specific RNAs.

[0190] A detailed description of therapeutic applications of the CRISPR-Cas systems described herein can be found, e.g., in U.S. Pat. No. 8,795,965, EP 3009511, WO 2016205764, and WO 2017070605; each of which is incorporated herein by reference in its entirety.

[0191] Delivery of CRISPR-Cas Systems

[0192] Through this disclosure and the knowledge in the art, the CRISPR-Cas systems described herein, or components thereof, nucleic acid molecules thereof, or nucleic acid molecules encoding or providing components thereof, can be delivered by various delivery systems such as vectors, e.g., plasmids, viral delivery vectors. The new CRISPR enzymes and/or any of the RNAs (e.g., RNA guides) can be delivered using suitable vectors, e.g., plasmids or viral vectors, such as adeno-associated viruses (AAV), lentiviruses, adenoviruses, and other viral vectors, or combinations thereof. The proteins and one or more RNA guides can be packaged into one or more vectors, e.g., plasmids or viral vectors.

[0193] In some embodiments, the vectors, e.g., plasmids or viral vectors, are delivered to the tissue of interest by, e.g., intramuscular injection, intravenous administration, transdermal administration, intranasal administration, oral administration, or mucosal administration. Such delivery may be either via a single dose or multiple doses. One skilled in the art understands that the actual dosage to be delivered herein may vary greatly depending upon a variety of factors, such as the vector choices, the target cells, organisms, tissues, the general conditions of the subject to be treated, the degrees of transformation/modification sought, the administration routes, the administration modes, the types of transformation/modification sought, etc.

[0194] In certain embodiments, the delivery is via adenoviruses, which can be at a single dose containing at least 1×10⁵ particles (also referred to as particle units, pu) of adenoviruses. In some embodiments, the dose preferably is at least about 1×10⁶ particles, at least about 1×10⁷ particles, at least about 1×10⁸ particles, and at least about 1×10⁹ particles of the adenoviruses. The delivery methods and the doses are described, e.g., in WO 2016205764 A1 and U.S. Pat. No. 8,454,972 B2, both of which are incorporated herein by reference in their entirety.

[0195] In some embodiments, the delivery is via a recombinant adeno-associated virus (rAAV) vector. For example, in some embodiments, a modified AAV vector may be used for delivery. Modified AAV vectors can be based on one or more of several capsid types, including AAV1, AV2, AAV5, AAV6, AAV8, AAV 8.2, AAV9, AAV rhlO, modified AAV vectors (e.g., modified AAV2, modified AAV3, modified AAV6) and pseudotyped AAV (e.g., AAV2/8, AAV2/5 and AAV2/6). Exemplary AAV vectors and techniques that may be used to produce rAAV particles are known in the art (see, e.g., Aponte-Ubillus et al. (2018) Appl. Microbiol. Biotechnol. 102(3): 1045-54; Zhong et al. (2012) J. Genet. Syndr. Gene Ther. S1: 008; West et al. (1987) Virology 160: 38-47 (1987); Tratschin et al. (1985) Mol. Cell. Biol. 5: 3251-60); U.S. Pat. Nos. 4,797,368 and 5,173,414; and International Publication Nos. WO 2015/054653 and WO 93/24641, each of which is incorporated herein by reference in its entirety).

[0196] In some embodiments, the delivery is via plasmids. The dosage can be a sufficient number of plasmids to elicit a response. In some cases, suitable quantities of plasmid DNA in plasmid compositions can be from about 0.1 to about 2 mg. Plasmids generally include (i) a promoter, (ii) a sequence encoding a nucleic acid-targeting CRISPR enzymes, operably linked to the promoter; (iii) a selectable marker, (iv) an origin of replication; and (v) a transcription terminator downstream of and operably linked to (ii). The plasmids can also encode the RNA components of a CRISPR complex, but one or more of these may instead be encoded on different vectors. The frequency of administration is within the ambit of the medical or veterinary practitioner (e.g., physician, veterinarian), or a person skilled in the art.

[0197] In another embodiment, the delivery is via liposomes or lipofectin formulations and the like, and can be prepared by methods known to those skilled in the art. Such methods are described, for example, in WO 2016205764 and U.S. Pat. Nos. 5,593,972; 5,589,466; and 5,580,859; each of which is incorporated herein by reference in its entirety.

[0198] In some embodiments, the delivery is via nanoparticles or exosomes. For example, exosomes have been shown to be particularly useful in delivery RNA.

[0199] Further means of introducing one or more components of the new CRISPR-Cas systems to the cell is by using cell penetrating peptides (CPP). In some embodiments, a cell penetrating peptide is linked to the CRISPR enzymes. In some embodiments, the CRISPR enzymes and/or RNA guides are coupled to one or more CPPs to transport them inside cells effectively (e.g., plant protoplasts). In some embodiments, the CRISPR enzymes and/or RNA guide(s) are encoded by one or more circular or non-circular DNA molecules that are coupled to one or more CPPs for cell delivery.

[0200] CPPs are short peptides of fewer than 35 amino acids derived either from proteins or from chimeric sequences capable of transporting biomolecules across cell membrane in a receptor independent manner. CPPs can be cationic peptides, peptides having hydrophobic sequences, amphipathic peptides, peptides having proline-rich and anti-microbial sequences, and chimeric or bipartite peptides. Examples of CPPs include, e.g., Tat (which is a nuclear transcriptional activator protein required for viral replication by HIV type 1), penetratin, Kaposi fibroblast growth factor (FGF) signal peptide sequence, integrin β3 signal peptide sequence, polyarginine peptide Args sequence, Guanine rich-molecular transporters, and sweet arrow peptide. CPPs and methods of using them are described, e.g., in Hallbrink et al., “Prediction of cell-penetrating peptides,” Methods Mol. Biol., 2015; 1324:39-58; Ramakrishna et al., “Gene disruption by cell-penetrating peptide-mediated delivery of Cas9 protein and guide RNA,” Genome Res., 2014 June; 24(6):1020-7; and WO 2016205764 A1; each of which is incorporated herein by reference in its entirety.

[0201] Various delivery methods for the CRISPR-Cas systems described herein are also described, e.g., in U.S. Pat. No. 8,795,965, EP 3009511, WO 2016205764, and WO 2017070605; each of which is incorporated herein by reference in its entirety.

ADDITIONAL SEQUENCES

NZ_LDOS01000005 H297A (SEQ ID NO: 1057)
MKLSPALPPTGDVLIYEYGARVDGDCLPAVGDQIAKARRLYNDLVAVIRGIVDEMRGFVLKH
AGSEALALQARIDGLSEAFDAARAANDEDRMKQIAGERRALWAELGEQVKAVRKAHRAEIQE
LFLSRIGKKSTCDTYQMRCKAVGDGLGWATANQVLDAALQAFKTSFQRGQAPRFARGEEKIQ
DTLTLQFTAAGGVPVAALLSGDHSELSMVSSCGRRKYGSFSFRLGSASADTYANGTWQYHRP
LPDGATVGLARLVRRSVGKDFKWALQLMVKRPATEPAMMEGRKPLVAVAFGWAGDASGRRVA
GITDGADPGVARVLQLPVEVEDGIRRAAEFQSARDEARDVIMTTIKNIAWGDAVACLGESSQ
FMHGSEPWLRARLSEELSTIRRLPAQHVAPRRLHRLCGLLRATNQMHDELEAWRKQDRLAWQ
ASAHMARRARNLRKDFYRRVAIDLARRYSAIVLEPLDLAAAALKVNEITGEKTEFAKKARSG
RVVAAIYELESSIRWAAAKSGTALLDLSGAETAARCGICGGASQSDESNSQVLHCVECGAEL
DRKKNGAAIAWQFAHENLDEAVTDFWAAVIAQRCEHAEKTREKKAKMAEGRRLARTLSAGVS
AVGSRNV
NZ_LDOS01000005 D303A (SEQ ID NO: 1058)
MKLSPALPPTGDVLIYEYGARVDGDCLPAVGDQIAKARRLYNDLVAVIRGIVDEMRGFVLKH
AGSEALALQARIDGLSEAFDAARAANDEDRMKQIAGERRALWAELGEQVKAVRKAHRAEIQE
LFLSRIGKKSTCDTYQMRCKAVGDGLGWATANQVLDAALQAFKTSFQRGQAPRFARGEEKIQ
DTLTLQFTAAGGVPVAALLSGDHSELSMVSSCGRRKYGSFSFRLGSASADTYANGTWQYHRP
LPDGATVGLARLVRRSVGKDFKWALQLMVKRPATEPAMMEGRKPLVAVHFGWAGAASGRRVA
GITDGADPGVARVLQLPVEVEDGIRRAAEFQSARDEARDVIMTTIKNIAWGDAVACLGESSQ
FMHGSEPWLRARLSEELSTIRRLPAQHVAPRRLHRLCGLLRATNQMHDELEAWRKQDRLAWQ
ASAHMARRARNLRKDFYRRVAIDLARRYSAIVLEPLDLAAAALKVNEITGEKTEFAKKARSG
RVVAAIYELESSIRWAAAKSGTALLDLSGAETAARCGICGGASQSDESNSQVLHCVECGAEL
DRKKNGAAIAWQFAHENLDEAVTDFWAAVIAQRCEHAEKTREKKAKMAEGRRLARTLSAGVS
AVGSRNV
NZ_LDOS01000005 E311A (SEQ ID NO: 1059)
MKLSPALPPTGDVLIYEYGARVDGDCLPAVGDQIAKARRLYNDLVAVIRGIVDEMRGFVLKH
AGSEALALQARIDGLSEAFDAARAANDEDRMKQIAGERRALWAELGEQVKAVRKAHRAEIQE
LFLSRIGKKSTCDTYQMRCKAVGDGLGWATANQVLDAALQAFKTSFQRGQAPRFARGEEKIQ
DTLTLQFTAAGGVPVAALLSGDHSELSMVSSCGRRKYGSFSFRLGSASADTYANGTWQYHRP
LPDGATVGLARLVRRSVGKDFKWALQLMVKRPATEPAMMEGRKPLVAVHFGWAGDASGRRVA
AITDGADPGVARVLQLPVEVEDGIRRAAEFQSARDEARDVIMTTIKNIAWGDAVACLGESSQ
FMHGSEPWLRARLSEELSTIRRLPAQHVAPRRLHRLCGLLRATNQMHDELEAWRKQDRLAWQ
ASAHMARRARNLRKDFYRRVAIDLARRYSAIVLEPLDLAAAALKVNEITGEKTEFAKKARSG
RVVAAIYELESSIRWAAAKSGTALLDLSGAETAARCGICGGASQSDESNSQVLHCVECGAEL
DRKKNGAAIAWQFAHENLDEAVTDFWAAVIAQRCEHAEKTREKKAKMAEGRRLARTLSAGVS
AVGSRNV
NZ_LDOS01000005 D504A (SEQ ID NO: 1060)
MKLSPALPPTGDVLIYEYGARVDGDCLPAVGDQIAKARRLYNDLVAVIRGIVDEMRGFVLKH
AGSEALALQARIDGLSEAFDAARAANDEDRMKQIAGERRALWAELGEQVKAVRKAHRAEIQE
LFLSRIGKKSTCDTYQMRCKAVGDGLGWATANQVLDAALQAFKTSFQRGQAPRFARGEEKIQ
DTLTLQFTAAGGVPVAALLSGDHSELSMVSSCGRRKYGSFSFRLGSASADTYANGTWQYHRP
LPDGATVGLARLVRRSVGKDFKWALQLMVKRPATEPAMMEGRKPLVAVHFGWAGDASGRRVA
GITDGADPGVARVLQLPVEVEDGIRRAAEFQSARDEARDVIMTTIKNIAWGDAVACLGESSQ
FMHGSEPWLRARLSEELSTIRRLPAQHVAPRRLHRLCGLLRATNQMHDELEAWRKQDRLAWQ
ASAHMARRARNLRKDFYRRVAIDLARRYSAIVLEPLDLAAAALKVNEITGEKTEFAKKARSG
RVVAAIYALESSIRWAAAKSGTALLDLSGAETAARCGICGGASQSDESNSQVLHCVECGAEL
DRKKNGAAIAWQFAHENLDEAVTDFWAAVIAQRCEHAEKTREKKAKMAEGRRLARTLSAGVS
AVGSRNV
NZ_LDOS01000005 D559A(SEQ ID NO: 1061)
MKLSPALPPTGDVLIYEYGARVDGDCLPAVGDQIAKARRLYNDLVAVIRGIVDEMRGFVLKH
AGSEALALQARIDGLSEAFDAARAANDEDRMKQIAGERRALWAELGEQVKAVRKAHRAEIQE
LFLSRIGKKSTCDTYQMRCKAVGDGLGWATANQVLDAALQAFKTSFQRGQAPRFARGEEKIQ
DTLTLQFTAAGGVPVAALLSGDHSELSMVSSCGRRKYGSFSFRLGSASADTYANGTWQYHRP
LPDGATVGLARLVRRSVGKDFKWALQLMVKRPATEPAMMEGRKPLVAVHFGWAGDASGRRVA
GITDGADPGVARVLQLPVEVEDGIRRAAEFQSARDEARDVIMTTIKNIAWGDAVACLGESSQ
FMHGSEPWLRARLSEELSTIRRLPAQHVAPRRLHRLCGLLRATNQMHDELEAWRKQDRLAWQ
ASAHMARRARNLRKDFYRRVAIDLARRYSAIVLEPLDLAAAALKVNEITGEKTEFAKKARSG
RVVAAIYELESSIRWAAAKSGTALLDLSGAETAARCGICGGASQSDESNSQVLHCVECGAEL
ARKKNGAAIAWQFAHENLDEAVTDFWAAVIAQRCEHAEKTREKKAKMAEGRRLARTLSAGVS
AVGSRNV
ADIG01000806 H300A (SEQ ID NO: 1062)
MIVQITPAPLPQGDVRIYEFGARLDHDCVRTVDEQIFKAHQLYNQLVACMQTTVRDMQAYLL
DHAGPDAHAAKARVDGLNEAFNAARAANDENRMTTVATERREAWRALAAVLRIARKEHRTAM
QETFLSRIGKKSACETYQLRCKAVADGLGWATANATLDAALIAFKKSFALGRAPRFARIADS
IQDTLTLQFTAAGGINIERLLDGKHTELALKPPAVCGKRGYGTFAFRLGAASAETQATGTWQ
YHRPLPPGGTVGLARLVRRRIGPKTTWSLQLQVRSPLPEREHEDRRPLVTVAPGWAADLSGR
RIAGIADAADPGLATVLQLPPDIEHGLQRAAELESTRSQARDALTPMLKVHPWPQELLNAAT
PEEDASASGDSGPMAPERIMCRKVADEILALRRLPAQHIAIRRLHRLARWLRLAEVDVPDWL
ETWRKEDKLRWQASAAAAKRARNRRRGFYRETALRLASQYQAIVIEPLNLADAAKKIDEATG
ERSDFAKKARAGRVVAAIFELDSAIRWAATKCGTAVLDLTGETAQHCAICGGHSLKADDEDS
QCLRCSDCGADIDRKRNGAALAWQAAAAHLETHLEDFWRLTLENRASAAAKRDEKKTKLQEG
RRAAMRETLET
ADI001000806 D306A (SEQ ID NO: 1063)
MIVQITPAPLPQGDVRIYEFGARLDHDCVRTVDEQIFKAHQLYNQLVACMQTTVRDMQAYLL
DHAGPDAHAAKARVDGLNEAFNAARAANDENRMTTVATERREAWRALAAVLRIARKEHRTAM
QETFLSRIGKKSACETYQLRCKAVADGLGWATANATLDAALIAFKKSFALGRAPRFARIADS
IQDTLTLQFTAAGGINIERLLDGKHTELALKPPAVCGKRGYGTFAFRLGAASAETQATGTWQ
YHRPLPPGGTVGLARLVRRRIGPKTTWSLQLQVRSPLPEREHEDRRPLVTVHPGWAAALSGR
RIAGIADAADPGLATVLQLPPDIEHGLQRAAELESTRSQARDALTPMLKVHPWPQELLNAAT
PEEDASASGDSGPMAPERIMCRKVADEILALRRLPAQHIAIRRLHRLARWLRLAEVDVPDWL
ETWRKEDKLRWQASAAAAKRARNRRRGFYRETALRLASQYQAIVIEPLNLADAAKKIDEATG
ERSDFAKKARAGRVVAAIFELDSAIRWAATKCGTAVLDLTGETAQHCAICGGHSLKADDEDS
QCLRCSDCGADIDRKRNGAALAWQAAAAHLETHLEDFWRLTLENRASAAAKRDEKKTKLQEG
RRAAMRETLET
ADIG01000806 E332A (SEQ ID NO: 1064)
MIVQITPAPLPQGDVRIYEFGARLDHDCVRTVDEQIFKAHQLYNQLVACMQTTVRDMQAYLL
DHAGPDAHAAKARVDGLNEAFNAARAANDENRMTTVATERREAWRALAAVLRIARKEHRTAM
QETFLSRIGKKSACETYQLRCKAVADGLGWATANATLDAALIAFKKSFALGRAPRFARIADS
IQDTLTLQFTAAGGINIERLLDGKHTELALKPPAVCGKRGYGTFAFRLGAASAETQATGTWQ
YHRPLPPGGTVGLARLVRRRIGPKTTWSLQLQVRSPLPEREHEDRRPLVTVHPGWAADLSGR
RIAGIADAADPGLATVLQLPPAIEHGLQRAAELESTRSQARDALTPMLKVHPWPQELLNAAT
PEEDASASGDSGPMAPERIMCRKVADEILALRRLPAQHIAIRRLHRLARWLRLAEVDVPDWL
ETWRKEDKLRWQASAAAAKRARNRRRGFYRETALRLASQYQAIVIEPLNLADAAKKIDEATG
ERSDFAKKARAGRVVAAIFELDSAIRWAATKCGTAVLDLTGETAQHCAICGGHSLKADDEDS
QCLRCSDCGADIDRKRNGAALAWQAAAAHLETHLEDFWRLTLENRASAAAKRDEKKTKLQEG
RRAAMRETLET
ADIG01000806 E516A (SEQ ID NO: 10651
MIVQITPAPLPQGDVRIYEFGARLDHDCVRTVDEQIFKAHQLYNQLVACMQTTVRDMQAYLL
DHAGPDAHAAKARVDGLNEAFNAARAANDENRMTTVATERREAWRALAAVLRIARKEHRTAM
QETFLSRIGKKSACETYQLRCKAVADGLGWATANATLDAALIAFKKSFALGRAPRFARIADS
IQDTLTLQFTAAGGINIERLLDGKHTELALKPPAVCGKRGYGTFAFRLGAASAETQATGTWQ
YHRPLPPGGTVGLARLVRRRIGPKTTWSLQLQVRSPLPEREHEDRRPLVTVHPGWAADLSGR
RIAGIADAADPGLATVLQLPPDIEHGLQRAAELESTRSQARDALTPMLKVHPWPQELLNAAT
PEEDASASGDSGPMAPERIMCRKVADEILALRRLPAQHIAIRRLHRLARWLRLAEVDVPDWL
ETWRKEDKLRWQASAAAAKRARNRRRGFYRETALRLASQYQAIVIEPLNLADAAKKIDEATG
ERSDFAKKARAGRVVAAIFALDSAIRWAATKCGTAVLDLTGETAQHCAICGGHSLKADDEDS
QCLRCSDCGADIDRKRNGAALAWQAAAAHLETHLEDFWRLTLENRASAAAKRDEKKTKLQEG
RRAAMRETLET
ADIG01000806 D569A (SEQ ID NO: 1066)
MIVQITPAPLPQGDVRIYEFGARLDHDCVRTVDEQIFKAHQLYNQLVACMQTTVRDMQAYLL
DHAGPDAHAAKARVDGLNEAFNAARAANDENRMTTVATERREAWRALAAVLRIARKEHRTAM
QETFLSRIGKKSACETYQLRCKAVADGLGWATANATLDAALIAFKKSFALGRAPRFARIADS
IQDTLTLQFTAAGGINIERLLDGKHTELALKPPAVCGKRGYGTFAFRLGAASAETQATGTWQ
YHRPLPPGGTVGLARLVRRRIGPKTTWSLQLQVRSPLPEREHEDRRPLVTVHPGWAADLSGR
RIAGIADAADPGLATVLQLPPDIEHGLQRAAELESTRSQARDALTPMLKVHPWPQELLNAAT
PEEDASASGDSGPMAPERIMCRKVADEILALRRLPAQHIAIRRLHRLARWLRLAEVDVPDWL
ETWRKEDKLRWQASAAAAKRARNRRRGFYRETALRLASQYQAIVIEPLNLADAAKKIDEATG
ERSDFAKKARAGRVVAAIFELDSAIRWAATKCGTAVLDLTGETAQHCAICGGHSLKADDEDS
QCLRCSDCGAAIDRKRNGAALAWQAAAAHLETHLEDFWRLTLENRASAAAKRDEKKTKLQEG
RRAAMRETLET

### EXAMPLES

[0202] The invention is further described in the following examples, which do not limit the scope of the invention described in the claims.

### Example 1—Identification of Minimal Components for CLUST.018837 CRISPR-Cas System (FIGS. 1-5)

[0203] Genome and metagenome sequences were downloaded from NCBI (Benson et al., 2013; Pruitt et al., 2012), NCBI whole genome sequencing (WGS), and DOE JGI Integrated Microbial Genomes (Markowitz et al., 2012) and processed as described in the Detailed Description of this disclosure.

[0204] The identified CRISPR-Cas system described herein, designated CLUST.018837, contains a large single effector associated with CRISPR arrays found in Acidithiobacillus, Clostridiales, Gordonia, Metallibacterium, Mycobacterium, Pelobacter, Rhodanobacter, Thioalkalivibrio, and Thiobacillus bacteria, as well as uncultured metagenomic sequences collected from a range of environments, including termite gut, soil, ground water, waste water, marine, and hot springs environments (TABLE 1). CLUST.018837 effectors include the exemplary proteins detailed in TABLES 1 and 2. Exemplary direct repeat sequences for these systems are shown in TABLE 3.
[0205] Examples of naturally occurring loci containing this effector complex are depicted in FIGS. 1A-B, indicating that for loci containing the CLUST.018837 CRISPR-Cas system, the effector protein co-occurs with a CRISPR array. No other families of large proteins were identified within a bi-directional 15 kb window that co-occur with the effector protein or CRISPR array.
[0206] The direct repeat sequences for CLUST.018837 CRISPR-Cas systems show a consensus 5′-YBVMRAC-3′ (wherein Y is C or T; B is T, C, or G; V is G, C, or A; M is A or C; and R is A or G) nucleotide sequence at the 3′ terminal end (FIG. 2B).
[0207] The predicted secondary structure of direct repeat sequences for example CLUST.018837 CRISPR-Cas systems is depicted in FIGS. 3A-B, indicating a high prevalence of predicted stem loop structures.
[0208] FIGS. 4A-F, combined, show a phylogenetic tree of CLUST.018837 effectors, showing that the family exhibits sequence diversity and at a top level comprises three sub-families.
[0209] An HMM profile search of the multiple sequence alignment of CLUST.018837 effectors against the PFAM database indicates the presence of the OrfB_Zn_ribbon domain (FIG. 5A). Manual inspection of the multiple sequence alignment reveals the locations of the conserved catalytic residues of the RuvC domain, indicated in FIG. 5B. Notably, the RuvC I domain does not contain any highly conserviced residues across this family.

TABLE 1
Representative CLUST.018837 Effector Proteins

| | | | | | effec- |
|---|---|---|---|---|---|
| | | # | | | tor |
| Species | effector accession | spacers | cas1 | cas2 | size |
| Metallibacterium scheffleri | WP_081130164.1 | 9 | N | N | 627 |
| (NZ_LDOS01000005) | | | | | |
| Thiobacillus denitrificans DSM 12475 | WP_018079340.1 | 2 | N | N | 633 |
| (NZ_AQWL01000014) | | | | | |
| Acidithiobacillus ferrooxidans | WP_064217851.1 | 5 | N | N | 596 |
| (NZ_LVXZ01000012) | | | | | |
| Acidithiobacillus thiooxidans | JMEB01000165_11 | 2 | N | N | 593 |
| (JMEB01000165) | | | | | |
| Acidithiobacillus thiooxidans | WP_051690567.1 | 2 | N | N | 615 |
| (JMEB01000165) | | | | | |
| Rhodanobacter sp. 67-28 | OJW42488.1 | 3 | N | N | 617 |
| (MKTU01000021) | | | | | |
| activated carbon metagenome | LNFM01018448_6 | 4 | N | N | 655 |
| (LNFM01018448) | | | | | |
| aquatic-freshwater | 3300004774\|Ga0007794_10001723_8 | 2 | N | N | 573 |
| (3300004774\|Ga0007794_10001723) | | | | | |
| aquatic-freshwater | 3300004776\|Ga0007800_10001775_2 | 2 | N | N | 573 |
| (3300004776\|Ga0007800_10001775) | | | | | |
| aquatic-freshwater-aquifer | 3300009004\|Ga0100377_1000348_44 | 2 | N | N | 614 |
| (3300009004\|Ga0100377_1000348) | | | | | |
| aquatic-freshwater-freshwater sediment | 3300004236\|Ga0066449_1000007_83 | 5 | N | N | 582 |
| (3300004236\|Ga0066449_1000007) | | | | | |
| aquatic-marine | 3300009432\|Ga0115005_10004282_5 | 3 | N | N | 585 |
| (3300009432\|Ga0115005_10004282) | | | | | |
| aquatic-marine | 3300009436\|Ga0115008_10017733_3 | 3 | N | N | 587 |
| (3300009436\|Ga0115008_10017733) | | | | | |
| aquatic-marine | 3300009436\|Ga0115008_10017733_4 | 3 | N | N | 569 |
| (3300009436\|Ga0115008_10017733) | | | | | |
| aquatic-marine-pelagic marine | 3300001351\|JGI20153J14318_100074 | 5 | N | N | 585 |
| (3300001351\|JGI20153J14318_1000749 | 90_6 | | | | |
| 0) | | | | | |
| aquatic-marine-pelagic marine | 3300009447\|Ga0115560_1022222_2 | 2 | N | N | 585 |
| (3300009447\|Ga0115560_1022222) | | | | | |
| aquatic-marine-pelagic marine | 3300009505\|Ga0115564_10016546_3 | 4 | N | N | 586 |
| (3300009505\|Ga0115564_10016546) | | | | | |
| aquatic-marine-seawater | 3300020165\|Ga0206125_10004811_3 | 4 | N | N | 592 |
| (3300020165\|Ga0206125_10004811) | | | | | |
| aquatic-thermal springs-hot spring | 3300010313\|Ga0116211_1004493_2 | 4 | N | N | 577 |
| (3300010313\|Ga0116211_1004493) | | | | | |
| arthropoda-digestive system-termite gut | 3300009784\|Ga0123357_10002363_9 | 24 | N | N | 614 |
| (3300009784\|Ga0123357_10002363) | | | | | |
| groundwater metagenome | ADIG01000806_20 | 5 | N | N | 631 |
| (ADIG01000806) | | | | | |
| groundwater metagenome | CXWL01128655_18 | 3 | N | N | 575 |
| (CXWL01128655) | | | | | |
| hot springs metagenome | OGCL01001770_13 | 5 | N | N | 577 |
| (OGCL01001770) | | | | | |
| soil metagenome (LNAP01002847) | LNAP01002847_16 | 3 | N | N | 579 |
| terrestrial-soil-pond soil | 3300007533\|Ga0102944_1000048_72 | 4 | N | N | 621 |
| (3300007533\|Ga0102944_1000048) | | | | | |
| terrestrial-soil-pond soil | 3300007533\|Ga0102944_1003721_10 | 6 | N | N | 632 |
| (3300007533\|Ga0102944_1003721) | | | | | |
| terrestrial-soil-pond soil | 3300007533\|Ga0102944_1003721_8 | 6 | N | N | 621 |
| (3300007533\|Ga0102944_1003721) | | | | | |
| wastewater metagenome | APMI01033782_24 | 9 | N | N | 612 |
| (APMI01033782) | | | | | |
| Clostridiales bacterium DRI-13 | NZ_JQKL01000024_23 | 14 | N | N | 567 |
| (NZ_JQKL01000024) | | | | | |
| Clostridiales bacterium DRI-13 | WP_081908191.1 | 14 | N | N | 594 |
| (NZ_JQKL01000024) | | | | | |
| Gordonia otitidis NBRC 100426 | GAB36148.1 | 5 | N | N | 607 |
| (BAFB01000202) | | | | | |
| Gordonia otitidis NBRC 100426 | BAFB01000202_4 | 5 | N | N | 591 |
| (BAFB01000202) | | | | | |
| Gordonia otitidis NBRC 100426 | WP_039994403.1 | 5 | N | N | 597 |
| (NZ_BAFB01000202) | | | | | |
| Meiothermus silvanus DSM 9946 | WP_013159911.1 | 3 | N | N | 536 |
| (NC_014214) | | | | | |
| Methylomonas koyamae (NZ_CP023670) | WP_096876841.1 | 4 | N | N | 589 |
| Mycobacterium conceptionense | WP_048895525.1 | 9 | N | N | 603 |
| (NZ_LF0D01000003) | | | | | |
| Mycobacterium mucogenicum | WP_061006603.1 | 14 | N | N | 596 |
| (LSKL01000323) | | | | | |
| Pelobacter propionicus DSM 2379 | WP_011733919.1 | 3 | N | N | 664 |
| (CP000483) | | | | | |
| Thioalkalivibrio thiocyanodenitrificans | WP_018234394.1 | 3 | N | N | 599 |
| ARhD 1 (NZ_KB900537) | | | | | |
| algae-green algae-macroalgal surface- | 33000009441BBAY81_10000005_89 | 6 | N | N | 636 |
| ecklonia radiata 2 | | | | | |
| (33000009441BBAY81_10000005) | | | | | |
| anaerobic digester metagenome | LSQX01035253_23 | 5 | N | N | 592 |
| (LSQX01035253) | | | | | |
| aquatic-freshwater | 3300013131\|Ga0172373_10056063_2 | 2 | N | N | 696 |
| (3300013131\|Ga0172373_10056063) | | | | | |
| aquatic-freshwater | 3300013136\|Ga0172370_10027535_4 | 5 | N | N | 670 |
| (3300013136\|Ga0172370_10027535) | | | | | |
| aquatic-freshwater | 3300013137\|Ga0172375_10012175_6 | 10 | N | N | 655 |
| (3300013137\|Ga0172375_10012175) | | | | | |
| aquatic-freshwater-anoxic lake water | 3300010293\|Ga0116204_1010874_1 | 3 | N | N | 601 |
| (3300010293\|Ga0116204_1010874) | | | | | |
| aquatic-freshwater-anoxic lake water | 3300010293\|Ga0116204_1010874_2 | 3 | N | N | 620 |
| (3300010293\|Ga0116204_1010874) | | | | | |
| aquatic-freshwater-aquifer | 3300008255\|Ga0100403_1011992_3 | 7 | N | N | 588 |
| (3300008255\|Ga0100403_1011992) | | | | | |
| aquatic-freshwater-bog | 3300014155\|Ga0181524_10003409_2 | 3 | N | N | 685 |
| (3300014155\|Ga0181524_10003409) | 3 | | | | |
| aquatic-freshwater-bog | 3300014156\|Ga0181518_10000096_2 | 12 | N | N | 685 |
| (3300014156\|Ga0181518_10000096) | 8 | | | | |
| aquatic-freshwater-bog | 3300014158\|Ga0181521_10000063_9 | 11 | N | N | 685 |
| (3300014158\|Ga0181521_10000063) | 2 | | | | |
| aquatic-freshwater-bog | 3300014159\|Ga0181530_10000119_9 | 11 | N | N | 685 |
| (3300014159\|Ga0181530_10000119) | 8 | | | | |
| aquatic-freshwater-bog | 3300014201\|Ga0181537_10003972_1 | 2 | N | N | 702 |
| (3300014201\|Ga0181537_10003972) | 3 | | | | |
| aquatic-freshwater-bog | 3300014201\|Ga0181537_10021284_1 | 31 | N | N | 629 |
| (3300014201\|Ga0181537_10021284) | | | | | |
| aquatic-freshwater-bog | 3300014201\|Ga0181537_10040512_3 | 9 | N | N | 560 |
| (3300014201\|Ga0181537_10040512) | | | | | |
| aquatic-freshwater-bog | 3300014654\|Ga0181525_10000532_4 | 7 | N | N | 618 |
| (3300014654\|Ga0181525_10000532) | | | | | |
| aquatic-freshwater-bog | 3300014657\|Ga0181522_10000394_5 | 23 | N | N | 591 |
| (3300014657\|Ga0181522_10000394) | 2 | | | | |
| aquatic-freshwater-bog | 3300014657\|Ga0181522_10000394_5 | 23 | N | N | 610 |
| (3300014657\|Ga0181522_10000394) | 3 | | | | |
| aquatic-freshwater-freshwater lake | 3300009175\|Ga0073936_10014029_2 | 5 | N | N | 717 |
| hypolimnion | | | | | |
| (3300009175\|Ga0073936_10014029) | | | | | |
| aquatic-freshwater-freshwater microbial | 3300015360\|Ga0163144_10020017_5 | 5 | N | N | 611 |
| mat | | | | | |
| (3300015360\|Ga0163144_10020017) | | | | | |
| aquatic-freshwater-freshwater microbial | 3300015360\|Ga0163144_10020017_4 | 5 | N | N | 588 |
| mat | | | | | |
| (3300015360\|Ga0163144_10020017) | | | | | |
| aquatic-freshwater-freshwater microbial | 3300015360\|Ga0163144_10033243_8 | 2 | N | N | 603 |
| mat | | | | | |
| (3300015360\|Ga0163144_10033243) | | | | | |
| aquatic-freshwater-freshwater microbial | 3300015360\|Ga0163144_10033243_7 | 2 | N | N | 555 |
| mat | | | | | |
| (3300015360\|Ga0163144_10033243) | | | | | |
| aquatic-freshwater-freshwater microbial | 3300015360\|Ga0163144_10062707_6 | 24 | N | N | 571 |
| mat | | | | | |
| (3300015360\|Ga0163144_10062707) | | | | | |
| aquatic-freshwater-freshwater microbial | 3300015360\|Ga0163144_10062707_6 | 24 | N | N | 562 |
| mat | | | | | |
| (3300015360\|Ga0163144_10062707) | | | | | |
| aquatic-freshwater-freshwater microbial | 3300020057\|Ga0163151_10006104_16 | 5 | N | N | 611 |
| mat | | | | | |
| (3300020057\|Ga0163151_10006104) | | | | | |
| aquatic-freshwater-freshwater microbial | 3300020186\|Ga0163153_10017638_7 | 6 | N | N | 561 |
| mat | | | | | |
| (3300020186\|Ga0163153_10017638) | | | | | |
| aquatic-freshwater-freshwater microbial | 3300020195\|Ga0163150_10003396_1 | 19 | N | N | 570 |
| mat | 4 | | | | |
| (3300020195\|Ga0163150_10003396) | | | | | |
| aquatic-freshwater-freshwater microbial | 3300020203\|Ga0163148_10001247_2 | 13 | N | N | 565 |
| mat | | | | | |
| (3300020203\|Ga0163148_10001247) | | | | | |
| aquatic-freshwater-freshwater microbial | 3300020203\|Ga0163148_10001247_2 | 13 | N | N | 574 |
| mat | | | | | |
| (3300020203\|Ga0163148_10001247) | | | | | |
| aquatic-freshwater-freshwater microbial | 3300020213\|Ga0163152_10009495_1 | 15 | N | N | 571 |
| mat | 4 | | | | |
| (3300020213\|Ga0163152_10009495) | | | | | |
| aquatic-freshwater-freshwater microbial | 3300020213\|Ga0163152_10009495_1 | 15 | N | N | 562 |
| mat | 4 | | | | |
| (3300020213\|Ga0163152_10009495) | | | | | |
| aquatic-freshwater-freshwater microbial | 3300020219\|Ga0163146_10006198_1 | 5 | N | N | 611 |
| mat | 8 | | | | |
| (3300020219\|Ga0163146_10006198) | | | | | |
| aquatic-freshwater-freshwater microbial | 3300020596\|Ga0163149_10010333_1 | 8 | N | N | 611 |
| mat | 3 | | | | |
| (3300020596\|Ga0163149_10010333) | | | | | |
| aquatic-freshwater-freshwater microbial | 3300020596\|Ga0163149_10010333_1 | 8 | N | N | 588 |
| mat | 2 | | | | |
| (3300020596\|Ga0163149_10010333) | | | | | |
| aquatic-freshwater-freshwater sediment | 3300004174\|Ga0066406_1000030_21 | 6 | N | N | 593 |
| (3300004174\|Ga0066406_1000030) | | | | | |
| aquatic-freshwater-freshwater sediment | 3300004200\|Ga0066422_1000628_7 | 6 | N | N | 593 |
| (3300004200\|Ga0066422_1000628) | | | | | |
| aquatic-freshwater-freshwater sediment | 3300004205\|Ga0066415_1000057_23 | 6 | N | N | 593 |
| (3300004205\|Ga0066415_1000057) | | | | | |
| aquatic-freshwater-freshwater sediment | 3300004565\|Ga0066503_104695_4 | 6 | N | N | 593 |
| (3300004565\|Ga0066503_104695) | | | | | |
| aquatic-freshwater-glacier valley | 3300009686\|Ga0123338_10029047_2 | 4 | N | N | 535 |
| (3300009686\|Ga0123338_10029047) | | | | | |
| aquatic-freshwater-groundwater | 330000124210687J13896_1000006_1 | 24 | N | N | 599 |
| (330000124210687J13896_1000006) | 34 | | | | |
| aquatic-freshwater-groundwater | 3300005236\|Ga0066636_10020712_3 | 8 | N | N | 588 |
| (3300005236\|Ga0066636_10020712) | | | | | |
| aquatic-freshwater-groundwater | 3300014208\|Ga0172379_10007070_1 | 3 | N | N | 623 |
| (3300014208\|Ga0172379_10007070) | 5 | | | | |
| aquatic-freshwater-groundwater | 3300014208\|Ga0172379_10014650_2 | 5 | N | N | 612 |
| (3300014208\|Ga0172379_10014650) | | | | | |
| aquatic-freshwater-groundwater | 3300014613\|Ga0180008_1000021_8 | 6 | N | N | 627 |
| (3300014613\|Ga0180008_1000021) | | | | | |
| aquatic-freshwater-groundwater | 3300014613\|Ga0180008_1000021_9 | 6 | N | N | 658 |
| (3300014613\|Ga0180008_1000021) | | | | | |
| aquatic-freshwater-groundwater | 3300014656\|Ga0180007_10000195_4 | 3 | N | N | 627 |
| (3300014656\|Ga0180007_10000195) | 4 | | | | |
| aquatic-freshwater-groundwater | 3300014656\|Ga0180007_10000195_4 | 3 | N | N | 658 |
| (3300014656\|Ga0180007_10000195) | 8 | | | | |
| aquatic-freshwater-groundwater | 3300014656\|Ga0180007_10004731_7 | 3 | N | N | 560 |
| (3300014656\|Ga0180007_10004731) | | | | | |
| aquatic-freshwater-groundwater | 3300014656\|Ga0180007_10004731_5 | 3 | N | N | 561 |
| (3300014656\|Ga0180007_10004731) | | | | | |
| aquatic-freshwater-groundwater | 3300015370\|Ga0180009_10002661_7 | 8 | N | N | 589 |
| (3300015370\|Ga0180009_10002661) | | | | | |
| aquatic-freshwater-peatland | 3300009760\|Ga0116131_1003961_2 | 5 | N | N | 606 |
| (3300009760\|Ga0116131_1003961) | | | | | |
| aquatic-freshwater-peatland | 3300018019\|Ga0187874_10017489_1 | 4 | N | N | 623 |
| (3300018019\|Ga0187874_10017489) | | | | | |
| aquatic-freshwater-peatland | 3300018025\|Ga0187885_10005575_2 | 6 | N | N | 619 |
| (3300018025\|Ga0187885_10005575) | | | | | |
| aquatic-freshwater-peatland | 3300018025\|Ga0187885_10005575_1 | 6 | N | N | 642 |
| (3300018025\|Ga0187885_10005575) | | | | | |
| aquatic-freshwater-peatland | 3300018057\|Ga0187858_10035455_2 | 2 | N | N | 623 |
| (3300018057\|Ga0187858_10035455) | | | | | |
| aquatic-freshwater-polar desert sand | 3300012183\|Ga0136624_1011435_1 | 3 | N | N | 556 |
| (3300012183\|Ga0136624_1011435) | | | | | |
| aquatic-freshwater-polar desert sand | 3300012682\|Ga0136611_10000100_4 | 12 | N | N | 582 |
| (3300012682\|Ga0136611_10000100) | | | | | |
| aquatic-freshwater-sediment | 3300013127\|Ga0172365_10004082_5 | 2 | N | N | 547 |
| (3300013127\|Ga0172365_10004082) | | | | | |
| aquatic-freshwater-sediment | 3300013127\|Ga0172365_10004082_3 | 2 | N | N | 538 |
| (3300013127\|Ga0172365_10004082) | | | | | |
| aquatic-freshwater-sediment | 3300013127\|Ga0172365_10033732_1 | 2 | N | N | 610 |
| (3300013127\|Ga0172365_10033732) | | | | | |
| aquatic-freshwater-sediment | 3300013128\|Ga0172366_10016188_4 | 2 | N | N | 547 |
| (3300013128\|Ga0172366_10016188) | | | | | |
| aquatic-freshwater-sediment | 3300013128\|Ga0172366_10018111_5 | 6 | N | N | 543 |
| (3300013128\|Ga0172366_10018111) | | | | | |
| aquatic-freshwater-sediment | 3300013129\|Ga0172364_10001281_2 | 16 | N | N | 593 |
| (3300013129\|Ga0172364_10001281) | 6 | | | | |
| aquatic-freshwater-sediment | 3300013129\|Ga0172364_10017363_4 | 2 | N | N | 547 |
| (3300013129\|Ga0172364_10017363) | | | | | |
| aquatic-freshwater-sediment | 3300013129\|Ga0172364_10018773_2 | 7 | N | N | 543 |
| (3300013129\|Ga0172364_10018773) | | | | | |
| aquatic-freshwater-sediment | 3300013129\|Ga0172364_10045136_2 | 2 | N | N | 610 |
| (3300013129\|Ga0172364_10045136) | | | | | |
| aquatic-freshwater-sediment | 3300013130\|Ga0172363_10000480_2 | 4 | N | N | 593 |
| (3300013130\|Ga0172363_10000480) | 2 | | | | |
| aquatic-freshwater-sediment | 3300013130\|Ga0172363_10009486_8 | 2 | N | N | 547 |
| (3300013130\|Ga0172363_10009486) | | | | | |
| aquatic-freshwater-sediment | 3300013130\|Ga0172363_10014785_2 | 2 | N | N | 566 |
| (3300013130\|Ga0172363_10014785) | | | | | |
| aquatic-freshwater-sediment | 3300013133\|Ga0172362_10012573_3 | 2 | N | N | 547 |
| (3300013133\|Ga0172362_10012573) | | | | | |
| aquatic-freshwater-sediment | 3300013133\|Ga0172362_10022806_8 | 2 | N | N | 566 |
| (3300013133\|Ga0172362_10022806) | | | | | |
| aquatic-freshwater-sediment | 3300013133\|Ga0172362_10025871_2 | 2 | N | N | 610 |
| (3300013133\|Ga0172362_10025871) | | | | | |
| aquatic-marine | 3300010155\|Ga0098047_10009758_2 | 2 | N | N | 620 |
| (3300010155\|Ga0098047_10009758) | | | | | |
| aquatic-marine-aqueous | 3300006805\|Ga0075464_10026824_2 | 10 | N | N | 479 |
| (3300006805\|Ga0075464_10026824) | | | | | |
| aquatic-marine-aqueous | 3300006805\|Ga0075464_10026824_2 | 10 | N | N | 481 |
| (3300006805\|Ga0075464_10026824) | | | | | |
| aquatic-marine-deep subsurface | 3300009149\|Ga0114918_10020022_2 | 5 | N | N | 664 |
| (3300009149\|Ga0114918_10020022) | | | | | |
| aquatic-marine-diffuse hydrothermal | 3300006083\|Ga0081762_1007854_6 | 8 | N | N | 572 |
| flow volcanic vent | | | | | |
| (3300006083\|Ga0081762_1007854) | | | | | |
| aquatic-marine-freshwater to marine | 3300010354\|Ga0129333_10000304_8 | 6 | N | N | 551 |
| saline gradient | | | | | |
| (3300010354\|Ga0129333_10000304) | | | | | |
| aquatic-marine-freshwater to marine | 3300010354\|Ga0129333_10000304_1 | 6 | N | N | 574 |
| saline gradient | 0 | | | | |
| (3300010354\|Ga0129333_10000304) | | | | | |
| aquatic-marine-pelagic marine | 3300009507\|Ga0115572_10029017_2 | 4 | N | N | 600 |
| (3300009507\|Ga0115572_10029017) | | | | | |
| aquatic-non marine saline and alkaline- | 3300017963\|Ga0180437_10000100_1 | 17 | N | N | 642 |
| hypersaline lake sediment | 51 | | | | |
| (3300017963\|Ga0180437_10000100) | | | | | |
| aquatic-non marine saline and alkaline- | 3300017963\|Ga0180437_10000153_2 | 10 | N | N | 732 |
| hypersaline lake sediment | 5 | | | | |
| (3300017963\|Ga0180437_10000153) | | | | | |
| aquatic-non marine saline and alkaline- | 3300017963\|Ga0180437_10000488_7 | 6 | N | N | 584 |
| hypersaline lake sediment | 8 | | | | |
| (3300017963\|Ga0180437_10000488) | | | | | |
| aquatic-non marine saline and alkaline- | 3300017963\|Ga0180437_10000692_1 | 5 | N | N | 654 |
| hypersaline lake sediment | 3 | | | | |
| (3300017963\|Ga0180437_10000692) | | | | | |
| aquatic-non marine saline and alkaline- | 3300017963\|Ga0180437_10006965_2 | 6 | N | N | 670 |
| hypersaline lake sediment | 0 | | | | |
| (3300017963\|Ga0180437_10006965) | | | | | |
| aquatic-non marine saline and alkaline- | 3300017963\|Ga0180437_10006965_2 | 6 | N | N | 645 |
| hypersaline lake sediment | 0 | | | | |
| (3300017963\|Ga0180437_10006965) | | | | | |
| aquatic-non marine saline and alkaline- | 3300017963\|Ga0180437_10073069_2 | 7 | N | N | 625 |
| hypersaline lake sediment | | | | | |
| (3300017963\|Ga0180437_10073069) | | | | | |
| aquatic-non marine saline and alkaline- | 3300017971\|Ga0180438_10000090_9 | 10 | N | N | 732 |
| hypersaline lake sediment | 1 | | | | |
| (3300017971\|Ga0180438_10000090) | | | | | |
| aquatic-non marine saline and alkaline- | 3300017971\|Ga0180438_10000124_1 | 5 | N | N | 654 |
| hypersaline lake sediment | 14 | | | | |
| (3300017971\|Ga0180438_10000124) | | | | | |
| aquatic-non marine saline and alkaline- | 3300017971\|Ga0180438_10000195_1 | 17 | N | N | 642 |
| hypersaline lake sediment | 44 | | | | |
| (3300017971\|Ga0180438_10000195) | | | | | |
| aquatic-non marine saline and alkaline- | 3300017971\|Ga0180438_10013386_7 | 8 | N | N | 584 |
| hypersaline lake sediment | | | | | |
| (3300017971\|Ga0180438_10013386) | | | | | |
| aquatic-non marine saline and alkaline- | 3300017971\|Ga0180438_10021273_1 | 6 | N | N | 645 |
| hypersaline lake sediment | | | | | |
| (3300017971\|Ga0180438_10021273) | | | | | |
| aquatic-non marine saline and alkaline- | 3300017971\|Ga0180438_10044179_5 | 3 | N | N | 674 |
| hypersaline lake sediment | | | | | |
| (3300017971\|Ga0180438_10044179) | | | | | |
| aquatic-non marine saline and alkaline- | 3300017971\|Ga0180438_10056790_2 | 6 | N | N | 645 |
| hypersaline lake sediment | | | | | |
| (3300017971\|Ga0180438_10056790) | | | | | |
| aquatic-non marine saline and alkaline- | 3300017971\|Ga0180438_10072596_2 | 3 | N | N | 556 |
| hypersaline lake sediment | | | | | |
| (3300017971\|Ga0180438_10072596) | | | | | |
| aquatic-non marine saline and alkaline- | 3300017987\|Ga0180431_10022214_3 | 6 | N | N | 572 |
| hypersaline lake sediment | | | | | |
| (3300017987\|Ga0180431_10022214) | | | | | |
| aquatic-non marine saline and alkaline- | 3300017987\|Ga0180431_10041976_5 | 11 | N | N | 556 |
| hypersaline lake sediment | | | | | |
| (3300017987\|Ga0180431_10041976) | | | | | |
| aquatic-non marine saline and alkaline- | 3300017989\|Ga0180432_10002388_5 | 6 | N | N | 572 |
| hypersaline lake sediment | | | | | |
| (3300017989\|Ga0180432_10002388) | | | | | |
| aquatic-non marine saline and alkaline- | 3300017989\|Ga0180432_10021155_3 | 20 | N | N | 630 |
| hypersaline lake sediment | | | | | |
| (3300017989\|Ga0180432_10021155) | | | | | |
| aquatic-non marine saline and alkaline- | 3300017989\|Ga0180432_10021155_5 | 20 | N | N | 643 |
| hypersaline lake sediment | | | | | |
| (3300017989\|Ga0180432_10021155) | | | | | |
| aquatic-non marine saline and alkaline- | 3300017989\|Ga0180432_10043261_1 | 2 | N | N | 651 |
| hypersaline lake sediment | | | | | |
| (3300017989\|Ga0180432_10043261) | | | | | |
| aquatic-non marine saline and alkaline- | 3300017989\|Ga0180432_10045094_6 | 4 | N | N | 633 |
| hypersaline lake sediment | | | | | |
| (3300017989\|Ga0180432_10045094) | | | | | |
| aquatic-non marine saline and alkaline- | 3300017991\|Ga0180434_10002646_1 | 6 | N | N | 572 |
| hypersaline lake sediment | | | | | |
| (3300017991\|Ga0180434_10002646) | | | | | |
| aquatic-non marine saline and alkaline- | 3300017991\|Ga0180434_10013735_9 | 9 | N | N | 549 |
| hypersaline lake sediment | | | | | |
| (3300017991\|Ga0180434_10013735) | | | | | |
| aquatic-non marine saline and alkaline- | 3300017992\|Ga0180435_10018121_1 | 6 | N | N | 642 |
| hypersaline lake sediment | 1 | | | | |
| (3300017992\|Ga0180435_10018121) | | | | | |
| aquatic-non marine saline and alkaline- | 3300018065\|Ga0180430_10011859_2 | 11 | N | N | 560 |
| hypersaline lake sediment | | | | | |
| (3300018065\|Ga0180430_10011859) | | | | | |
| aquatic-non marine saline and alkaline- | 3300018065\|Ga0180430_10038979_3 | 7 | N | N | 567 |
| hypersaline lake sediment | | | | | |
| (3300018065\|Ga0180430_10038979) | | | | | |
| aquatic-non marine saline and alkaline- | 3300018080\|Ga0180433_10006034_1 | 13 | N | N | 575 |
| hypersaline lake sediment | 7 | | | | |
| (3300018080\|Ga0180433_10006034) | | | | | |
| aquatic-non marine saline and alkaline- | 3300018080\|Ga0180433_10006034_1 | 13 | N | N | 598 |
| hypersaline lake sediment | 8 | | | | |
| (3300018080\|Ga0180433_10006034) | | | | | |
| aquatic-non marine saline and alkaline- | 3300018080\|Ga0180433_10012134_6 | 13 | N | N | 610 |
| hypersaline lake sediment | | | | | |
| (3300018080\|Ga0180433_10012134) | | | | | |
| aquatic-non marine saline and alkaline- | 3300018080\|Ga0180433_10012134_6 | 13 | N | N | 642 |
| hypersaline lake sediment | | | | | |
| (3300018080\|Ga0180433_10012134) | | | | | |
| aquatic-non marine saline and alkaline- | 3300018080\|Ga0180433_10020043_6 | 12 | N | N | 640 |
| hypersaline lake sediment | | | | | |
| (3300018080\|Ga0180433_10020043) | | | | | |
| aquatic-non marine saline and alkaline- | 3300018080\|Ga0180433_10021337_5 | 10 | N | N | 549 |
| hypersaline lake sediment | | | | | |
| (3300018080\|Ga0180433_10021337) | | | | | |
| aquatic-non marine saline and alkaline- | 3300018080\|Ga0180433_10021840_7 | 5 | N | N | 584 |
| hypersaline lake sediment | | | | | |
| (3300018080\|Ga0180433_10021840) | | | | | |
| aquatic-non marine saline and alkaline- | 3300018080\|Ga0180433_10021840_7 | 5 | N | N | 601 |
| hypersaline lake sediment | | | | | |
| (3300018080\|Ga0180433_10021840) | | | | | |
| aquatic-non marine saline and alkaline- | 3300001256\|JGI12210J13797_104956 | 5 | N | N | 580 |
| hypersaline mat | 08_9 | | | | |
| (3300001256IJG112210J13797_1049560 | | | | | |
| 8) | | | | | |
| aquatic-non marine saline and alkaline- | 3300001256\|JGI12210J13797_104956 | 7 | N | N | 580 |
| hypersaline mat | 10_14 | | | | |
| (3300001256IJG112210J13797_1049561 | | | | | |
| 0) | | | | | |
| aquatic-non marine saline and alkaline- | 3300005917\|Ga0075115_10002831_4 | 14 | N | N | 635 |
| saline lake | | | | | |
| (3300005917\|Ga0075115_10002831) | | | | | |
| aquatic-non marine saline and alkaline- | 3300005918\|Ga0075116_10002890_7 | 3 | N | N | 635 |
| saline lake | | | | | |
| (3300005918\|Ga0075116_10002890) | | | | | |
| aquatic-sediment-groundwater | 3300011414\|Ga0137442_1000121_10 | 17 | N | N | 631 |
| sediment | | | | | |
| (3300011414\|Ga0137442_1000121) | | | | | |
| aquatic-sediment-groundwater | 3300011431\|Ga0137438_1001223_2 | 8 | N | N | 631 |
| sediment | | | | | |
| (3300011431\|Ga0137438_1001223) | | | | | |
| aquatic-sediment-groundwater | 3300011441\|Ga0137452_1000071_9 | 7 | N | N | 553 |
| sediment | | | | | |
| (3300011441\|Ga0137452_1000071) | | | | | |
| aquatic-thermal springs-hot spring | 3300006855\|Ga0079044_1002244_2 | 3 | N | N | 625 |
| (3300006855\|Ga0079044_1002244) | | | | | |
| aquatic-thermal springs-hot spring | 3300006855\|Ga0079044_1002244_2 | 3 | N | N | 649 |
| (3300006855\|Ga0079044_1002244) | | | | | |
| aquatic-thermal springs-hot spring | 3300009503\|Ga0123519_10000481_1 | 8 | N | N | 598 |
| (3300009503\|Ga0123519_10000481) | 9 | | | | |
| aquatic-thermal springs-hot spring | 3300009503\|Ga0123519_10000481_2 | 8 | N | N | 618 |
| (3300009503\|Ga0123519_10000481) | 2 | | | | |
| aquatic-thermal springs-hot spring | 3300006865\|Ga0073934_10032691_1 | 2 | N | N | 572 |
| sediment | | | | | |
| (3300006865\|Ga0073934_10032691) | | | | | |
| aquatic-thermal springs-hypersaline mat | 3300001340\|JGI20133J14441_100260 | 11 | N | N | 580 |
| (3300001340IJGI20133J14441_1002607) | 7_2 | | | | |
| arthropoda-digestive system-termite gut | 3300009784\|Ga0123357_10000018_1 | 2 | N | N | 619 |
| (3300009784\|Ga0123357_10000018) | 05 | | | | |
| arthropoda-digestive system-termite gut | 3300009784\|Ga0123357_10000074_4 | 2 | N | N | 667 |
| (3300009784\|Ga0123357_10000074) | 2 | | | | |
| arthropoda-digestive system-termite gut | 3300009784\|Ga0123357_10000076_3 | 2 | N | N | 618 |
| (3300009784\|Ga0123357_10000076) | 2 | | | | |
| groundwater metagenome | BBPF01004549_6 | 9 | N | N | 584 |
| (BBPF01004549) | | | | | |
| groundwater metagenome | BBPG01001333_4 | 8 | N | N | 584 |
| (BBPG01001333) | | | | | |
| human gut metagenome | OGZV01009429_1 | 3 | N | N | 567 |
| (OGZV01009429) | | | | | |
| human gut metagenome | OKWZ01000119_10 | 4 | N | N | 563 |
| (OKWZ01000119) | | | | | |
| human metagenome (ODGR01000476) | ODGR01000476_16 | 2 | N | N | 567 |
| human metagenome (ODIG01000268) | ODIG01000268_14 | 4 | N | N | 563 |
| human metagenome (ODIP01002140) | ODIP01002140_2 | 4 | N | N | 567 |
| human metagenome (ODIW01000227) | ODIW01000227_18 | 4 | N | N | 567 |
| human metagenome (ODJA01000260) | ODJA01000260_38 | 4 | N | N | 563 |
| human metagenome (ODJP01000229) | ODJP01000229_55 | 4 | N | N | 563 |
| human metagenome (ODKZ01007116) | ODKZ01007116_1 | 3 | N | N | 567 |
| human metagenome (ODM001000523) | ODM001000523_12 | 4 | N | N | 563 |
| human metagenome (ODTN01000195) | ODTN01000195_35 | 4 | N | N | 563 |
| human metagenome (ODTP01000194) | ODTP01000194_18 | 4 | N | N | 567 |
| human metagenome (ODWI01002981) | ODWI01002981_3 | 2 | N | N | 563 |
| human metagenome (ODZZ01005262) | ODZZ01005262_2 | 4 | N | N | 563 |
| human metagenome (OEED01000500) | OEED01000500_25 | 4 | N | N | 567 |
| human metagenome (OEFT01000529) | OEFT01000529_3 | 4 | N | N | 563 |
| marine sediment metagenome | LAZR01002400_15 | 20 | N | N | 492 |
| (LAZR01002400) | | | | | |
| marine sediment metagenome | LAZR01002400_19 | 20 | N | N | 511 |
| (LAZR01002400) | | | | | |
| metagenome (FLSK01003024) | FLSK01003024_2 | 4 | N | N | 563 |
| metagenome (OFLM01000072) | OFLM01000072_9 | 4 | N | N | 567 |
| metagenome (OFLO01000090) | OFLO01000090_50 | 4 | N | N | 567 |
| metagenome (OFLU01000140) | OFLU01000140_22 | 3 | N | N | 567 |
| metagenome (OFLV01000230) | OFLV01000230_3 | 3 | N | N | 567 |
| metagenome (OGCY01000078) | OGCY01000078_30 | 3 | N | N | 567 |
| metagenome (OGJ001000473) | OGJ001000473_2 | 4 | N | N | 563 |
| metagenome (OGJT01000109) | OGJT01000109_37 | 3 | N | N | 567 |
| metagenome (OGJZ01005194) | OGJZ01005194_5 | 2 | N | N | 567 |
| metagenome (OGK001001669) | OGK001001669_8 | 4 | N | N | 567 |
| metagenomes unclassified sequences. | OFC101000292_37 | 5 | N | N | 582 |
| (OFC101000292) | | | | | |
| plants-endosphere-populus endosphere | 3300006048\|Ga0075363_100000001_ | 4 | N | N | 634 |
| (3300006048\|Ga0075363_100000001) | 25 | | | | |
| plants-endosphere-populus endosphere | 3300006048\|Ga0075363_100000001_ | 4 | N | N | 648 |
| (3300006048\|Ga0075363_100000001) | 20 | | | | |
| plants-endosphere-populus endosphere | 3300006048\|Ga0075363_100000020_ | 18 | N | N | 488 |
| (3300006048\|Ga0075363_100000020) | 49 | | | | |
| plants-endosphere-populus endosphere | 3300006178\|Ga0075367_10000108_6 | 4 | N | N | 634 |
| (3300006178\|Ga0075367_10000108) | | | | | |
| plants-endosphere-populus endosphere | 3300006178\|Ga0075367_10000108_6 | 4 | N | N | 648 |
| (3300006178\|Ga0075367_10000108) | | | | | |
| plants-endosphere-populus endosphere | 3300006195\|Ga0075366_10000160_1 | 4 | N | N | 634 |
| (3300006195\|Ga0075366_10000160) | 3 | | | | |
| plants-peat moss-host associated | 3300009500\|Ga0116229_10010095_9 | 21 | N | N | 604 |
| (3300009500\|Ga0116229_10010095) | | | | | |
| plants-peat moss-host associated | 3300009701\|Ga0116228_10018148_5 | 4 | N | N | 683 |
| (3300009701\|Ga0116228_10018148) | | | | | |
| plants-rhizoplane-corn rhizosphere | 3300005577\|Ga0068857_100000008_ | 15 | N | N | 698 |
| (3300005577\|Ga0068857_100000008) | 197 | | | | |
| plants-rhizoplane-miscanthus | 3300005338\|Ga0068868_100030384_ | 5 | N | N | 637 |
| rhizosphere | 5 | | | | |
| (3300005338\|Ga0068868_100030384) | | | | | |
| plants-rhizoplane-switchgrass | 3300005841\|Ga0068863_100041042_ | 13 | N | N | 693 |
| rhizosphere | 2 | | | | |
| (3300005841\|Ga0068863_100041042) | | | | | |
| plants-rhizoplane-switchgrass | 3300013306\|Ga0163162_10000022_1 | 20 | N | N | 586 |
| rhizosphere | 53 | | | | |
| (3300013306\|Ga0163162_10000022) | | | | | |
| plants-rhizosphere-miscanthus | 3300009148\|Ga0105243_10000126_6 | 10 | N | N | 626 |
| rhizosphere | 0 | | | | |
| (3300009148\|Ga0105243_10000126) | | | | | |
| plants-rhizosphere-populus rhizosphere | 3300006846\|Ga0075430_100000057_ | 3 | N | N | 617 |
| (3300006846\|Ga0075430_100000057) | 67 | | | | |
| plants-rhizosphere-populus rhizosphere | 3300006853\|Ga0075420_100000070_ | 3 | N | N | 617 |
| (3300006853\|Ga0075420_100000070) | 3 | | | | |
| plants-rhizosphere-populus rhizosphere | 3300006854\|Ga0075425_100000037_ | 22 | N | N | 488 |
| (3300006854\|Ga0075425_100000037) | 57 | | | | |
| plants-rhizosphere-populus rhizosphere | 3300006903\|Ga0075426_10000611_2 | 2 | N | N | 646 |
| (3300006903\|Ga0075426_10000611) | 8 | | | | |
| plants-rhizosphere-populus rhizosphere | 3300006914\|Ga0075436_100000782_ | 2 | N | N | 646 |
| (3300006914\|Ga0075436_100000782) | 9 | | | | |
| plants-rhizosphere-populus rhizosphere | 3300007076\|Ga0075435_100000061_ | 2 | N | N | 646 |
| (3300007076\|Ga0075435_100000061) | 47 | | | | |
| plants-rhizosphere-populus rhizosphere | 3300007076\|Ga0075435_100000750_ | 22 | N | N | 488 |
| (3300007076\|Ga0075435_100000750) | 29 | | | | |
| plants-rhizosphere-populus rhizosphere | 3300009100\|Ga0075418_10076301_2 | 6 | N | N | 710 |
| (3300009100\|Ga0075418_10076301) | | | | | |
| plants-rhizosphere-populus rhizosphere | 3300009100\|Ga0075418_10076301_2 | 6 | N | N | 713 |
| (3300009100\|Ga0075418_10076301) | | | | | |
| plants-rhizosphere-populus rhizosphere | 3300009156\|Ga0111538_10081463_8 | 3 | N | N | 558 |
| (3300009156\|Ga0111538_10081463) | | | | | |
| plants-rhizosphere-switchgrass | 3300005548\|Ga0070665_100000073_ | 7 | N | N | 597 |
| rhizosphere | 173 | | | | |
| (3300005548\|Ga0070665_100000073) | | | | | |
| soil metagenome (OBLM01000011) | OBLM01000011_1 | 2 | N | N | 635 |
| soil metagenome (OCTA010000646) | OCTA010000646_37 | 6 | N | N | 628 |
| soil metagenome (ODAK010001378) | ODAK010001378_33 | 5 | N | N | 617 |
| soil metagenome (ODAK010029943) | ODAK010029943_5 | 11 | N | N | 595 |
| soil metagenome (ODAK010029943) | ODAK010029943_6 | 11 | N | N | 638 |
| terrestrial-soil | 3300005602\|Ga0070762_10000001_3 | 50 | N | N | 628 |
| (3300005602\|Ga0070762_10000001) | 4 | | | | |
| terrestrial-soil | 3300005602\|Ga0070762_10000001_3 | 50 | N | N | 660 |
| (3300005602\|Ga0070762_10000001) | 2 | | | | |
| terrestrial-soil | 3300006796\|Ga0066665_10000988_1 | 2 | N | N | 628 |
| (3300006796\|Ga0066665_10000988) | 5 | | | | |
| terrestrial-soil | 3300018429\|Ga0190272_10000030_1 | 4 | N | N | 622 |
| (3300018429\|Ga0190272_10000030) | 13 | | | | |
| terrestrial-soil | 3300018432\|Ga0190275_10000082_1 | 10 | N | N | 605 |
| (3300018432\|Ga0190275_10000082) | 54 | | | | |
| terrestrial-soil | 3300018481\|Ga0190271_10027355_3 | 7 | N | N | 596 |
| (3300018481\|Ga0190271_10027355) | | | | | |
| terrestrial-soil | 3300019874\|Ga0193744_1000265_21 | 4 | N | N | 488 |
| (3300019874\|Ga0193744_1000265) | | | | | |
| terrestrial-soil | 3300020021\|Ga0193726_1013919_1 | 3 | N | N | 711 |
| (3300020021\|Ga0193726_1013919) | | | | | |
| terrestrial-soil | 3300020021\|Ga0193726_1013919_1 | 3 | N | N | 745 |
| (3300020021\|Ga0193726_1013919) | | | | | |
| terrestrial-soil | 3300020034\|Ga0193753_10002988_1 | 2 | N | N | 630 |
| (3300020034\|Ga0193753_10002988) | 0 | | | | |
| terrestrial-soil | 3300020034\|Ga0193753_10002988_9 | 2 | N | N | 669 |
| (3300020034\|Ga0193753_10002988) | | | | | |
| terrestrial-soil | 3300020156\|Ga0196970_1000866_40 | 6 | N | N | 559 |
| (3300020156\|Ga0196970_1000866) | | | | | |
| terrestrial-soil | 3300020579\|Ga0210407_10000200_1 | 8 | N | N | 621 |
| (3300020579\|Ga0210407_10000200) | 4 | | | | |
| terrestrial-soil | 3300020580\|Ga0210403_10000550_3 | 8 | N | N | 621 |
| (3300020580\|Ga0210403_10000550) | 5 | | | | |
| terrestrial-soil | 3300020580\|Ga0210403_10001296_1 | 5 | N | N | 518 |
| (3300020580\|Ga0210403_10001296) | 7 | | | | |
| terrestrial-soil | 3300020581\|Ga0210399_10010852_9 | 9 | N | N | 596 |
| (3300020581\|Ga0210399_10010852) | | | | | |
| terrestrial-soil | 3300020583\|Ga0210401_10033176_5 | 3 | N | N | 518 |
| (3300020583\|Ga0210401_10033176) | | | | | |
| terrestrial-soil-agricultural soil | 3300005435\|Ga0070714_100002341_ | 11 | N | N | 521 |
| (3300005435\|Ga0070714_100002341) | 12 | | | | |
| terrestrial-soil-agricultural soil | 3300009095\|Ga0079224_100000262_ | 6 | N | N | 573 |
| (3300009095\|Ga0079224_100000262) | 28 | | | | |
| terrestrial-soil-agricultural soil | 3300009095\|Ga0079224_100170797_ | 3 | N | N | 618 |
| (3300009095\|Ga0079224_100170797) | 3 | | | | |
| terrestrial-soil-bog forest soil | 3300010343\|Ga0074044_10013672_1 | 9 | N | N | 672 |
| (3300010343\|Ga0074044_10013672) | | | | | |
| terrestrial-soil-bog forest soil | 3300010343\|Ga0074044_10041345_4 | 3 | N | N | 561 |
| (3300010343\|Ga0074044_10041345) | | | | | |
| terrestrial-soil-corn, switchgrass and | 3300005468\|Ga0070707_100000083_ | 3 | N | N | 628 |
| miscanthus rhizosphere | 12 | | | | |
| (3300005468\|Ga0070707_100000083) | | | | | |
| terrestrial-soil-corn, switchgrass and | 3300006163\|Ga0070715_10000067_4 | 42 | N | N | 690 |
| miscanthus rhizosphere | 4 | | | | |
| (3300006163\|Ga0070715_10000067) | | | | | |
| terrestrial-soil-fen | 3300014498\|Ga0182019_10003703_1 | 4 | N | N | 630 |
| (3300014498\|Ga0182019_10003703) | | | | | |
| terrestrial-soil-forest soil | 3300001131\|JGI12631J13338_100029 | 22 | N | N | 674 |
| (3300001131\|JGI12631J13338_1000296) | 6_13 | | | | |
| terrestrial-soil-forest soil | 3300001593\|JGI12635J15846_100028 | 22 | N | N | 674 |
| (3300001593\|JGI12635J15846_1000285 | 52_1 | | | | |
| 2) | | | | | |
| terrestrial-soil-groundwater sand | 3300009813\|Ga0105057_1000075_5 | 8 | N | N | 600 |
| (3300009813\|Ga0105057_1000075) | | | | | |
| terrestrial-soil-groundwater sand | 3300009813\|Ga0105057_1000075_5 | 8 | N | N | 604 |
| (3300009813\|Ga0105057_1000075) | | | | | |
| terrestrial-soil-palsa | 3300014489\|Ga0182018_10031574_1 | 4 | N | N | 525 |
| (3300014489\|Ga0182018_10031574) | | | | | |
| terrestrial-soil-palsa | 3300014501\|Ga0182024_10047267_8 | 13 | N | N | 643 |
| (3300014501\|Ga0182024_10047267) | | | | | |
| terrestrial-soil-palsa | 3300014501\|Ga0182024_10150440_2 | 3 | N | N | 640 |
| (3300014501\|Ga0182024_10150440) | | | | | |
| terrestrial-soil-peatlands soil | 3300001356\|JG112269J14319_100019 | 5 | N | N | 552 |
| (3300001356\|JG112269J14319_1000196 | 68_12 | | | | |
| 8) | | | | | |
| terrestrial-soil-pond soil | 3300007533\|Ga0102944_1012316_2 | 13 | N | N | 622 |
| (3300007533\|Ga0102944_1012316) | | | | | |
| terrestrial-soil-rice paddy soil | 3300005903\|Ga0075279_10000001_3 | 5 | N | N | 701 |
| (3300005903\|Ga0075279_10000001) | 0 | | | | |
| terrestrial-soil-surface soil | 3300005524\|Ga0070737_10002282_1 | 8 | N | N | 739 |
| (3300005524\|Ga0070737_10002282) | 0 | | | | |
| terrestrial-soil-surface soil | 3300005524\|Ga0070737_10031205_1 | 5 | N | N | 615 |
| (3300005524\|Ga0070737_10031205) | | | | | |
| terrestrial-soil-surface soil | 3300005524\|Ga0070737_10031205_1 | 5 | N | N | 628 |
| (3300005524\|Ga0070737_10031205) | | | | | |
| terrestrial-soil-surface soil | 3300005534\|Ga0070735_10023967_5 | 2 | N | N | 607 |
| (3300005534\|Ga0070735_10023967) | | | | | |
| terrestrial-soil-surface soil | 3300005542\|Ga0070732_10013271_3 | 2 | N | N | 520 |
| (3300005542\|Ga0070732_10013271) | | | | | |
| terrestrial-soil-terrestrial soil | 3300010373\|Ga0134128_10000310_1 | 4 | N | N | 670 |
| (3300010373\|Ga0134128_10000310) | 09 | | | | |
| terrestrial-soil-terrestrial soil | 3300010373\|Ga0134128_10011458_1 | 4 | N | N | 675 |
| (3300010373\|Ga0134128_10011458) | | | | | |
| terrestrial-soil-terrestrial soil | 3300010373\|Ga0134128_10096594_3 | 4 | N | N | 674 |
| (3300010373\|Ga0134128_10096594) | | | | | |
| terrestrial-soil-terrestrial soil | 3300010400\|Ga0134122_10000107_5 | 2 | N | N | 631 |
| (3300010400\|Ga0134122_10000107) | 7 | | | | |
| terrestrial-soil-terrestrial soil | 3300010401\|Ga0134121_10002041_1 | 2 | N | N | 564 |
| (3300010401\|Ga0134121_10002041) | 7 | | | | |
| terrestrial-soil-tropical forest soil | 3300004633\|Ga0066395_10000027_3 | 9 | N | N | 586 |
| (3300004633\|Ga0066395_10000027) | 2 | | | | |
| terrestrial-soil-tropical forest soil | 3300005332\|Ga0066388_100004304_ | 7 | N | N | 644 |
| (3300005332\|Ga0066388_100004304) | 4 | | | | |
| terrestrial-soil-tropical forest soil | 3300005332\|Ga0066388_100004304_ | 7 | N | N | 619 |
| (3300005332\|Ga0066388_100004304) | 2 | | | | |
| terrestrial-soil-tropical forest soil | 3300005764\|Ga0066903_100000051_ | 9 | N | N | 586 |
| (3300005764\|Ga0066903_100000051) | 27 | | | | |
| terrestrial-soil-tropical forest soil | 3300010047\|Ga0126382_10001209_1 | 5 | N | N | 651 |
| (3300010047\|Ga0126382_10001209) | 4 | | | | |
| terrestrial-soil-tropical forest soil | 3300010047\|Ga0126382_10001209_1 | 5 | N | N | 619 |
| (3300010047\|Ga0126382_10001209) | 2 | | | | |
| terrestrial-soil-tropical forest soil | 3300010048\|Ga0126373_10000093_1 | 4 | N | N | 598 |
| (3300010048\|Ga0126373_10000093) | 02 | | | | |
| terrestrial-soil-tropical forest soil | 3300010366\|Ga0126379_10001683_1 | 6 | N | N | 619 |
| (3300010366\|Ga0126379_10001683) | 0 | | | | |
| terrestrial-soil-tropical forest soil | 3300010376\|Ga0126381_100020658_ | 3 | N | N | 592 |
| (3300010376\|Ga0126381_100020658) | 4 | | | | |
| terrestrial-soil-tropical forest soil | 3300010398\|Ga0126383_10032213_5 | 2 | N | N | 570 |
| (3300010398\|Ga0126383_10032213) | | | | | |
| terrestrial-soil-tropical peatland | 3300017961\|Ga0187778_10004454_1 | 4 | N | N | 612 |
| (3300017961\|Ga0187778_10004454) | | | | | |
| terrestrial-soil-tropical peatland | 3300017970\|Ga0187783_10000008_2 | 16 | N | N | 565 |
| (3300017970\|Ga0187783_10000008) | 3 | | | | |
| terrestrial-soil-tropical peatland | 3300017972\|Ga0187781_10019688_5 | 13 | N | N | 705 |
| (3300017972\|Ga0187781_10019688) | | | | | |
| terrestrial-soil-tropical peatland | 3300018064\|Ga0187773_10011230_2 | 2 | N | N | 640 |
| (3300018064\|Ga0187773_10011230) | | | | | |
| terrestrial-soil-vadose zone soil | 3300012204\|Ga0137374_10001132_4 | 22 | N | N | 666 |
| (3300012204\|Ga0137374_10001132) | | | | | |
| terrestrial-soil-vadose zone soil | 3300012210\|Ga0137378_10000107_4 | 3 | N | N | 670 |
| (3300012210\|Ga0137378_10000107) | 7 | | | | |
| terrestrial-soil-vadose zone soil | 3300012532\|Ga0137373_10000316_4 | 22 | N | N | 666 |
| (3300012532\|Ga0137373_10000316) | | | | | |
| terrestrial-soil-vadose zone soil | 3300012532\|Ga0137373_10000407_4 | 26 | N | N | 479 |
| (3300012532\|Ga0137373_10000407) | 3 | | | | |
| terrestrial-soil-vadose zone soil | 3300012930\|Ga0137407_10020190_4 | 5 | N | N | 545 |
| (3300012930\|Ga0137407_10020190) | | | | | |
| wastewater-nutrient removal- | 3300005987\|1071089\|scaffold14955_ | 13 | N | N | 632 |
| wastewater effluent | 2 | | | | |
| (3300005987110710891scaffold14955) | | | | | |
| wastewater-nutrient removal- | 3300005988\|1071091\|scaffold06014_ | 13 | N | N | 632 |
| wastewater effluent | 8 | | | | |
| (3300005988110710911scaffold06014) | | | | | |
| wastewater-nutrient removal- | 3300006056\|1071094\|scaffold118627_ | 5 | N | N | 632 |
| wastewater effluent | 2 | | | | |
| (3300006056110710941scaffold118627) | | | | | |

TABLE 2
Amino Acid Sequences of Representative CLUST.018837 Effector Proteins*

>WP_081130164.1
[Metallibacterium scheffleri]
MKLSPALPPTGDVLIYEYGARVDGDCLPAVGDQIAKARRLYNDLVAVIRGIVDEMRGFVLKHAGSEALALQAR
IDGLSEAFDAARAANDEDRMKQIAGERRALWAELGEQVKAVRKAHRAEIQELFLSRIGKKSTCDTYQMRCKAV
GDGLGWATANQVLDAALQAFKTSFQRGQAPRFARGEEKIQDTLTLQFTAAGGVPVAALLSGDHSELSMVSSCG
RRKYGSFSFRLGSASADTYANGTWQYHRPLPDGATVGLARLVRRSVGKDFKWALQLMVKRPATEPAMMEGRKP
LVAVHFGWAGDASGRRVAGITDGADPGVARVLQLPVEVEDGIRRAAEFQSARDEARDVIMTTIKNIAWGDAVA
CLGESSQFMHGSEPWLRARLSEELSTIRRLPAQHVAPRRLHRLCGLLRATNQMHDELEAWRKQDRLAWQASAH
MARRARNLRKDFYRRVAIDLARRYSAIVLEPLDLAAAALKVNEITGEKTEFAKKARSGRVVAAIYELESSIRW
AAAKSGTALLDLSGAETAARCGICGGASQSDESNSQVLHCVECGAELDRKKNGAAIAWQFAHENLDEAVTDFW
AAVIAQRCEHAEKTREKKAKMAEGRRLARTLSAGVSAVGSRNV (SEQ ID NO: 1)
>WP_018079340.1
[Thiobacillus denitfificans DSM 12475]
MSEIKPSLLPQGNVLIYEYGARLDKDCIQAVGDQIIKSRRLYNDLVATIRGIVTEMKAFVLEKSGPDAQRCQE
EIDALNAAFDAARAENNEDAMKCIAESRREKWRELAVFVKEARKNHRSDIQSMYLSRIGKNSACETYRIRSKA
VADGLGWATANQVLDAALTAFKKSFARGNAPRFAVGEDKDQDTLTLQFTAAGGVPVDTILAGKHGEVALSPTN
GCGPRKYGELRFRLGAAKAATNATGTWQYHRPLPDGATAGLCRLIRRRVGKDYKWAIQMQVKRPPIEQEALAG
RKPLVAVHFGWAANDEGRCVAGITDGADPGQAYVLKLPAEVEQSLVRSSAIQSERDSARDAIVPRLKEIEVPD
MDIESVESLPPDSPEVRLARAADELKAIHRLPANHVAIRRLHRLCGMLRDVDFLPEWLEDWRKEDRLQWQSAA
HIARRARNTRKGFYRQTAIDLARQYSSIVLEPLDLAKAAVKIDEITGERTEFAKKARAGRVVAALYELESAIR
WAAAKAGSAMFELTGETASRCSICGGDVLPDETNGQLLHCTECGADLDRKQNGAAMAWQLANDDLESLVEAFW
TETFAARRSAENEQAEKKQKMAEGRRKARTPIGGENTEVSRDSGNGANA (SEQ ID NO: 2)
>WP_064217851.1
[Acidithiobacillus ferrooxidans]
MSTITYEYGVRLEPDCIQHVDHQIILARGTYNEMIAAMRSVHDAAQSFQMEKAGPEGRAIAARIEALNTAFKE
ARAQQQEESLLQAIAVERRQCWRDLGVILKGVRQEHKKTLQEVFYNRIGINKGTDTYAIRCKAVADGLGWATA
QDVLNRAIIAWKMSMKLGRAPQFARGDEKTQDALTVQFTEKGGMPKDKMLEGESAVIGVEQPENTGKRAYGHF
WFRLGSASEGHYARGTIQWHRDLPEDASMASARLVRKRTGCKMKYYMQYVINTAQIRQVSDHARKALLAVHMG
WSADISGRRVCGITDAADPELAQIIQLPPEIERNIQRAANIQGKRDQARDEIAPKIRAFDGSLPPEWDESTQD
YWSHWKVLPANHMAASRIHAWRKRLGDFAPEWMAEWCKADRMLWIAATHTAQRARNRRKDFYRNLAKTWASQY
EAIVIEKPDIKKAAKILDEATGERTEFAKKARAGRVLASLYTLDSAIRWACQKNGTAILDMNGEKTAATCAMC
ASEAIRADTEDGQVLHCADCGAVLDRKKNGAAVAWQLVNEQRENLVEEYWAEQLNKEREAAEAKASRLEKMQA
ARRAKREPALAD (SEQ ID NO: 3)
>JMEB01000165_11
[Acidithiobacillus thiooxidans]
MNLKVCGDIDDQIRRARAMYNNIIAVMRGIYDEMQTFTMEHAGPEGQALHEKIVAANVAFDAAKADNDEPRMK
QIAMERRELWKALSIILKEVRKEHKNTLKERFYSRIGNNSSTETYQCRAEAIVGGLGYATATKVLDNALKAWQ
MSMVKGKAPRFARGEEKDQDTLTLQFSQAGGVPVEDIFTGKRKDIGIEYPKKGFGPRSYSAFRFRLGAASEES
YAEGTVQLHRAIPENARIAMAHLTRKKAGRKYQYELQLLATLAEPINLLPDHRRKPLVAIHFGWSGDEEGRRL
AGIADNADPLEARLLTLPPDIEDDIREASALQAKRDTYRDEVFLRLKEENTLPTKGETPLSEHWNKIRKLPAQ
HVSANRMHHLAWLVKSELIEIPEWFETWRKADQRMWVQATSLARRARNRRKKYYEKVAIDLASRYEAILIEMP
DLKKSAEKVNEKTGEKTEFAKKARSGRVIAALYVLESAIQWAACKHGSAVLKIKGEKTASVCAFCEGDHLEEK
EEHDSQTLYCPDCGSTVDRKLNGAANAWKRAASDLESLVTEYWEETREKQMGKAETKRLKSEKMAEARRLKRQ
AASQASAGA (SEQ ID NO: 4)
>WP_051690567.1
[Acidithiobacillus thiooxidans]
MSQIKIVPQINGSQLVYKYGVRMNLKVCGDIDDQIRRARAMYNNIIAVMRGIYDEMQTFTMEHAGPEGQALHE
KIVAANVAFDAAKADNDEPRMKQIAMERRELWKALSIILKEVRKEHKNTLKERFYSRIGNNSSTETYQCRAEA
IVGGLGYATATKVLDNALKAWQMSMVKGKAPRFARGEEKDQDTLTLQFSQAGGVPVEDIFTGKRKDIGIEYPK
KGFGPRSYSAFRFRLGAASEESYAEGTVQLHRAIPENARIAMAHLTRKKAGRKYQYELQLLATLAEPINLLPD
HRRKPLVAIHFGWSGDEEGRRLAGIADNADPLEARLLTLPPDIEDDIREASALQAKRDTYRDEVFLRLKEENT
LPTKGETPLSEHWNKIRKLPAQHVSANRMHHLAWLVKSELIEIPEWFETWRKADQRMWVQATSLARRARNRRK
KYYEKVAIDLASRYEAILIEMPDLKKSAEKVNEKTGEKTEFAKKARSGRVIAALYVLESAIQWAACKHGSAVL
KIKGEKTASVCAFCEGDHLEEKEEHDSQTLYCPDCGSTVDRKLNGAANAWKRAASDLESLVTEYWEETREKQM
GKAETKRLKSEKMAEARRLKRQAASQASAGA (SEQ ID NO: 5)
>OJW42488.1
[Rhodanobacter sp. 67-28]
MKITPASLPQGDVRIYEFGARLDKDCLEAANDQFFKAHQLYNELVACMQGTLRDMQAYLLENAGQEAQSAQAR
VEALNEALSAAKAANDEDTMKAVASERREVWRTLAALLRDTRKVHKATLQERFLCRIGRKSTCATYQLRCDAV
AAGLGWATANATLDAALLAFKSSFVQGRAPRFAKAGESTQDSLTLQFTAAGGVSVSTLLEGRHTEFRVKASGG
CGPRRYGTLEFRLGPASSETYAAGTWQYHRAMPDDGAVGLVRLVRRRLGPKFQWAIQFQVRSPLPVNDSVGER
KPLVALHAGWAADLTGRRVAGIADGADPGLARVLQLPPEIEAGLQHSGEVESARSVARDNVVATLKAHAWPQD
LLDAAEQPTEDATPEATRRSQAAADLLVIRRLPATHVAIRRLHRLAQRLRDTADLPDWFEAWRKEDKLAWQKA
AHAAKRARNRRKGFYREVALGLATGYQAIVLQPLDLESAAKKVDDASGERTEFGRKARSGRVVAAIYELEGAI
RWAAAKCGTAVLELTGETAGHCAYCGGAVKPVEDDSQRLACTQCGADIDRKRNGAALAWQATEESLPTLVEDF
WRETLAARDGAAAKRKEKREKVAEARRASRVVE (SEQ ID NO: 6)
>LNFM01018448_6
[activated carbon metagenome]
MTMEQAMVGAVYESASAAGEEVMASRNETTQEETDAFSVSFSTVGPAEVMVYEFGCRIAKGDLDHLRDQLWRS
RRLFNEVAAQINQTVDEAKCFLSDRAGPVAGEIAVRLGVLDTEWKSAKALDDREALVKIAGERKSLRTRWYGL
LHKARREHGTELRERYLSRIGNRVGAATYALRCAAVDDGLDWAMGNEALAAALGAFGKQWPRFKPISFRRFDD
PTEVATLQFTAAGGVAVADILADKHSQIGMQLGREQAGRRMYVPFRMKLGSGAQKKAITGTVLYHRPLPAGAS
VPIARLVGRRIGKDVKHYLQFMVKLKQAEQPGANSKRAPMGVAHLGWYYQPTGRRLAEVASSEDPGLSEQLTL
PIEVAELLDRARELDGQRSKLRDGIVGSVVRELPVEGAPEQIAEEVAALRKMRIEHVAPRRLGKLVFIWSRNC
ADWQRDRLKAMQAWRLEDRMLWQSSAHTARRARNRRRKHYEQLALSLAGKFTNILIDVPDLAQVAKVKDEDTG
EHNGLGARARGGRFDAALYELTSAIEKAGARLGCNVGKIKGPTASTCAHCGGTTKMGKTVRDVVCEACGAVED
RAASAAAVAFGWASQNKDAVDEAVAAALDADRAKATRAAERKEKMAIARATSRAARTESDEDSADGSRELK
(SEQ ID NO: 7)
>3300004774|Ga0007794_10001723_8
[aquatic-freshwater]
MTIKVYKFGLLDPVSGWDQTAIDVLFLRNKLWNNLVAMEHDKRQAYRNLLLDSDTELAALQARLDAIEVEKAS
LITSKKALRAKARSRQVDTAEIDLEIKKLLEERKALGGQTKDLRERVKIEVKPLAAELDQQRYEKTKQLNKES
GLWWCNSMTVIAAYEVGRLRAMREKNELRFHGFDGTGKYSVCRTGGFSLDHVMTGKLSFVSIRTLPIANLDDL
SERGQRSRARHHLTMIVLRATTEEGTKIRHEVTWPIILHRPLPDDCLIKQIQVLRKRVGDRFEWTCSITVDTP
EELKARLDSPSISVCGIDLGFRQVNNDLRVATLADSSGGLRYYTIGKDWLDSMDYVEAIQSDLSGTANSVWAQ
LRLILKELDEYPEALRERITDMLKAGAKTPIRAMRAMQKTLSNEPDLMPDALALLDDWKKRIRRRTKEMHDLR
DKLINRRKDIYRNIACEIARDYSLVRIANLKLKDMVKLKRNDGTDTKLTDNARKNCNRAALSELTLYIQQACA
KNGVALEKIDTTYMTRTCYQCGYLNPANTINLLLSCEGCGAEYDQDDNAAKNYLNATKPGTG (SEQ ID
NO: 8)
>3300004776|Ga0007800_10001775_2
[aquatic-freshwater]
MTIKVYKFGLLDPVSGWDQTAIDVLFLRNKLWNNLVAMEHDKRQAYRNLLLDSDTELAALQARLDAIEVEKAS
LITSKKALRAKARSRQVDTAEIDLEIKKLLEERKALGGQTKDLRERVKIEVKPLAAELDQQRYEKTKQLNKES
GLWWCNSMTVIAAYEVGRLRAMREKNELRFHGFDGTGKYSVCRTGGFSLDHVMTGKLSFVSIRTLPIANLDDL
SERGQRSRARHHLTMIVLRATTEEGTKIRHEVTWPIILHRPLPDDCLIKQIQVLRKRVGDRFEWTCSITVDTP
EELKARLDSPSISVCGIDLGFRQVNNDLRVATLADSSGGLRYYTIGKDWLDSMDYVEAIQSDLSGTANSVWAQ
LRLILKELDEYPEALRERITDMLKAGAKTPIRAMRAMQKTLSNEPDLMPDALALLDDWKKRIRRRTKEMHDLR
DKLINRRKDIYRNIACEIARDYSLVRIANLKLKDMVKLKRNDGTDTKLTDNARKNCNRAALSELTLYIQQACA
KNGVALEKIDTTYMTRTCYQCGYLNPANTINLLLSCEGCGAEYDQDDNAAKNYLNATKPGTG (SEQ ID
NO: 8)
>3300009004|Ga0100377_1000348_44
[aquatic-freshwater-aquifer]
MTNQENFSIKAAKTPSGDVLIYEFGARLDKECAAEVDKQIKQARGLYNNIVALMRDTMDEMRADLVENAGPVA
RETQAAIDALNLKFAEAKARDDEGAMLLIAQQRRELWAQLSALLKEVRASLKSEHKSRFFSRIGINSSCATYQ
LRSVAVKEGLGWGTANEILDNVLGAWKKSLAMGKAPRFVSAAEKMQDTLTLQFTAAGGISVVDLLSRSKGDMI
LTPPSEAGKRKYGSFQFRMGAASSNSYATGTWQYHRPLPEGSSVGVARLIRRRVGKDTKYAIQLQVKIKEGIE
QAVRNRKPLATVHFGWAGDVEGRRVAGIADSAEPSSAQVIALPTEIEEMLARSTTIQGERDTERDNIVPVVKQ
LDPTKFDETLAEEVTALNKLPAQHIAIRRLHRLCRHLGDVDMLPEALAEWRKADRMRWQSETHLARRARNQRK
DFYRNIAINLARNYEVIAIEPLDLAKAAIKLDKMTGEKTELSKKARSGRVVAAIYELESAIRWAAVKTGAAVL
ELTAAKTASVCSICGGHVSDDTENSQILHCDDCGADLDRKQNGAAIAWQMVEPLREDLAVDYHQAKIDAARAT
KQKMVEKLGKLAEGRLKGREAKAGSAANPE (SEQ ID NO: 9)
>3300004236|Ga0066449_1000007_83
[aquatic-freshwater-freshwater sediment]
MINCYKFGCLQPTAGFDQSAIEHLFLRNKLWNTLVALDHEFRQRYRDLMLNSDEKLKSVQDSIDSINQEIEDL
VENKMKLRQKERTKNIDSKLLDERINVLKAKRKTLSADSKTERERVKVEIKPQIDLLNTERYEAKKLAYKESG
LWWGNYETVVAAYDTASQKAMKSNTELRFKSFDGSGKFAVRFEDGGLTIDELKAGASNLCRIETLNTSAFQNL
SQRSIKSKARHSLTMTIYTFNDEKGKKQRKEITVPIIFHREMEEGKIKTIHLQRKRLGNQFTWSASFTLKNDI
EPANVADHPATASCGIDLGYRLVKDGLRVATVADSQNNVEYLVLPKSWIDRMDYTETLQSGLSEAMTLMWAKL
KAEIAKIPEYPDAVAEIIKNMQKMGDRLPYKGIKRLYRVLKEQDATGSPVAGFNAVLDILKAWDKATYRQELE
MVNLKDKLLKQREHIYRNFAAGLTKKYAHIVVEDMGLAELAKTEKSETETNDMPNAVKANRQRASLYSLVEAI
RLSAAKVGSYFEKSKAAYSSMTCNVCGHLNPKTQNIHQSCESCNTMYDVDENAARNFLKGEYINEKVLKQG
(SEQ ID NO: 10)
>3300009432|Ga0115005_10004282_5
[aquatic-marine]
MATRVYKYGLIPIGYPPQAAIDELFRANSLKNTLVALHRESRENWDDARRSASILYSEKMDELDKKNEDITEA
FNGLNKARMDEGTKDETGNKRLLAERAIINRLKKEKGDIYAELKPLRKEADKSIDKKALNDAYRQKCNDAVSA
KVSGVYRRTAEQIYANFKTAKDKASKDNATLQFHRFDGTGYFQFRCNPKGVSTDGISVDAFMSANFDGYMRCA
VQSVDNSKKKPRIRINAVLAGGRTKASKVFQEFDWIYHRPLPADAQIQNGKILRTRVGDKFRYDLVLTIRVPD
VEMVQPAKLSGTIGIDVGFRKVGNTLLIGTVMSSDRSQKAVALEVPQMMVSALEHVVALQGELDDAASDLGKA
ITPLLKANPIDDEHSKYRLWRSLALRPLHVTLSFEQAYKLSLWLKHEPSLFPSEINLKVHTWWRSYSRKYREI
HNRRKKQLTHRKHFYRETAAKLVAENKLIVLEDINLTDFAETKSKNTKLSNKARAQRFMASLGEFRDAIKNAA
GREGVPVIDVNPAYTSKTCSDCGHLNKELRSEKEWTCPACGVVHDRDENAANNLQKMGQKYLLDVQKAASMVV
Q (SEQ ID NO: 11)
>3300009436|Ga0115008_10017733_3
[aquatic-marine]
MTTRVYKYGLIPIGYPPQVAIDELFRANNLWNTLVALHRESRENWDDARRSASILYSEKMDELDKKNKDIREA
FNGLNQARMDEGTKDETGNKRLQAERAIINRLTKEQKEIYAELNPLRKEADKTVDKKALNDEYRKKCNTAVSA
KVSGVYSRTAGELYAYFRTARDKAFKDKTTLRFHRFDGTGYFAFRCRSKAVGVNVDGISVEDFMSQGFMDYMR
CAVMSIDESKKKPRILISAVLTGGATKASKVVQEFDWIYHRPLPPEGQIQNGKILRTRVGDKFKYDLVLTVKL
PDVEMIQPAALNGTIGIDVGFRKVGNSLLIGTVMFSDSAQKAVALEVPTMVVSALEHVDALRSELDDVASDLG
KAITPLLKANPIDEEHDKYRLWRSLALRPLHVTLSFEQAYKLALWLKREPNLFPSEINEKVHTWWRSYSRKYR
EIHNRRKKQLTHRKHFYRETAAKLIAQNKLIVLEKIDLTDFAETKNKNTKLSNKARSQRFMAALGEFRDAIKN
AADREGVPVIDVNAAYTSKTCSECGYLNKELKSEKEWNCPECGVVHDRDENAANNLQKMGQKYLLDAAKTAVV
VVK (SEQ ID NO: 12)
>3300009436|Ga0115008_10017733_4
[aquatic-marine]
MAIDELFRANNLWNTLVALHRESRENWDDARRSASILYSEKMDELDKKNKDIREAFNGLNQARMDEGTKDETG
NKRLQAERAIINRLTKEQKEIYAELNPLRKEADKTVDKKALNDEYRKKCNTAVSAKVSGVYSRTAGELYAYFR
TARDKAFKDKTTLRFHRFDGTGYFAFRCRSKAVGVNVDGISVEDFMSQGFMDYMRCAVMSIDESKKKPRILIS
AVLTGGATKASKVVQEFDWIYHRPLPPEGQIQNGKILRTRVGDKFKYDLVLTVKLPDVEMIQPAALNGTIGID
VGFRKVGNSLLIGTVMFSDSAQKAVALEVPTMVVSALEHVDALRSELDDVASDLGKAITPLLKANPIDEEHDK
YRLWRSLALRPLHVTLSFEQAYKLALWLKREPNLFPSEINEKVHTWWRSYSRKYREIHNRRKKQLTHRKHFYR
ETAAKLIAQNKLIVLEKIDLTDFAETKNKNTKLSNKARSQRFMAALGEFRDAIKNAADREGVPVIDVNAAYTS
KTCSECGYLNKELKSEKEWNCPECGVVHDRDENAANNLQKMGQKYLLDAAKTAVVVVK (SEQ ID NO:
13)
>3300001351|JGI20153J14318_10007490_6
[aquatic-marine-pelagic marine]
MATRVYKYGLIPIGYPPKETIDELFKANVLWNNLVALHRKNREDWDDARRAASILYSDKIDELEKKEEDLDAA
WKAFQQARMDEGTRDETNNKRLKSERASINRLKAERAEIYKELKPLRKEADKEIDKKQLNDSFRAQVNEALSV
NNSGVYRAIADQIYENFKTAKDKSIKENATLRFHRFDGTGYYHFRCRRKGTNVDGISIDDFMSRNFEAYPRCA
VQNIDNSKKKPRIRINAVLAGGKSKASKIHQEFDLIYHRPLPIDAQIQNGKILRTRVGDKFKYDLVLTLKIPD
KEPISYNNLKGTIGIDIGFRRSVNSLLIGTVMSSDVTEEAYEIIVPPKIVEAFEHVIDLQSELDDAATDLGRI
ITPLLKAHPLDEDHSKYKMWRSLALRPAHVTLSFEQAYKLAIWLKHEPDTFPEEITKKVHTWWRSYSRKYREL
HNRRRNQLTHRKHFYREEAAKIVALNKLIVLEEINLTDFAETKEKNTKLSKKARAQRFMASLSEFRDAIKNAA
QRDGIGIIDVNPAYTSKTCSECGNLNKDLRSEKQWSCPACGVVHDRDENAANNLQKMGQSYLENIKKETSEII
E (SEQ ID NO: 14)
>3300009447|Ga0115560_1022222_2
[aquatic-marine-pelagic marine]
MATRVYKYGLIPIGYPPKETIDELFKANVLWNNLVALHRKNREDWDDARRAASILYSDKIDELEKKEEDLDAA
WKAFQQARMDEGTRDETNNKRLKSERASINRLKAERAEIYKELKPLRKEADKEIDKKQLNDSYRAQVNEAISV
RNSGIYNATAGQVLDNFKAARDRSFKENATLKFHRFDGTGYYHFRCRRRGAKVDGINVEDFMSRNFIANPRCA
VQSIDNSKKKPRIRINAVLAGGQSKASKVHQEFDLIYHRPLPIDAQIQNGKILRTRVGDKFKYDLVLTLKIPD
KEPISYNNLKGTIGIDIGFRRSVNSLLIGTVMSSNVSEKAYEIKVPPKIVEAFEHVIDLKSELDDAATDLGRI
ITPLMKAHPLDEDHSKYKMWRSLALRPAHVTLSFEQAYKLAIWLKHEPDTFPEEITKKVHTWWRSYSRKYREL
HNRRRNQLTHRKHFYREEAAKIVALNKLIVLEEINLTDFAETKEKNTKLSKKARAQRFMASLSEFRDAIKNAA
QRDGIGIIDVNPAYTSKTCSECGNLNKDLRSEKQWSCPACGVVHDRDENAANNLQKMGQTYLESLKKETSEVI
E (SEQ ID NO: 15)
>3300009505|Ga0115564_10016546_3
[aquatic-marine-pelagic marine]
MATRVYKYGLIPIGYPAKETIDELFKANVLWNNLVALHRKNREDWDDARRAASVLYSDKIDDLEKKEEDLDAA
WKAFQQARMDEGTRDETNNKRLKSERASINRLDTEKAEIYKELKPLRKEADKEIDKKQLNDAYRTKVNEAVSV
RNSGIYSATAGQILENFKTARDRSFKESATTLRFHRFDGTGYYQFRCRRKGTNVDGISIDDFMSRNFEANPRC
AVQSIDNRKKKPRIRIDAVLVGGQSKASKIHQEFDLIYHRPLPIDAQIQNGKILRTRVGDKFKYDLVLTLKIP
DKEPISYNNLKGTVGIDIGFRRSVNSLLIGTVMSSDVTEKAYEIKVPPKIVEAFEHVIDLQSELDDAATDLGR
IITPLLKAHPLDEDHNKYKMWRSLALRPAHVTLSFEQAYKLAIWLKHETDTFPEEITKKVHTWWRSYSRKYRE
LHNRRRNQLTHRKHFYREEAAKIVALNKLIVLEEINLTDFAETKEKNTKLSKKARAQRFMASLSEFRDAIRNA
AQRDGIGIIDVNPAYTSKTCSECGNLNKDLKSEKQWSCPACGVVHDRDENAANNLQKMGQTYLESLKKETSEV
IE (SEQ ID NO: 16)
>3300020165|Ga0206125_10004811_3
[aquatic-marine-seawater]
MWCEINMATRVYKYGLIPIGYPPKETIDELFKANVLWNNLVALHRKNREDWDDARRAASILYSDKIDELEKKE
EDLDAAWKAFQQARMDEGTRDETNNKRLKSGRASINRLDAEKAEIYKELKPLRKEADKEIDKKQLNDAYRTKV
NEAVSVRNSGIYSATAGQILENFKTARDRSFKESATTLRFHRFDGTGYYQFRCRRKGTNVDGISIDDFMSRNF
EANPRCAVQSIDNSKKKPRIRIDAVLVGGQSKASKIHQEFDLIYHRPLPIDAQIQNGKILRTRVGDKFKYDLV
LTLKIPDKEPISYNNLKGTIGIDIGFRRSVNSLLIGTVMSSDVTEKAYEIKVPPKIVEAFVHVIDLQSELDDA
ATDLGRIITPLLKAHPLDENHSKYKMWRSLALRPAHVTLSFEQAYKLAIWLKHEPDTFPEEITKQVHTWWRSY
SRKYRELHNRRRNQLTHRKHFYREEAAKIVALNKLIVLEEINLTDFAETKEKNTKLSKKARAQRFMASLSEFR
DAIRNAAQRDGIGIIDVNPAYTSKTCSECGNLNKGLRSEKQWSCPACGVVHDRDENAANNLQKMGQSYLESVK
KETSEVIE (SEQ ID NO: 17)
>3300010313|Ga0116211_1004493_2
[aquatic-thermal springs-hot spring]
MIKAFKYGMLEPVAGFDKAAIDVLYLRNKLWNSLVELEKAHRERYRTLITGSDDELSKIQARLDQIEAERAEL
VKRKRQARAMVRSKKVDTSEHDDRIDMLMAERNDLRTKAKDIRLQVKEKVKPAIADLEKERYEAVKHLIHEAG
LWWCNSETVIAAYDLARVKAMKENAELRFRSFDGSGKFAVRKTGGFALSDLVSGKLSFARLEALPDANFAHLS
ERGKRSRARHHLTMTILTYKDESGKLCRHEVTWPIILHRPLPPEGMIKFIHVQRKRIGKDFQWTCSITMEVDE
IQKTPIDHPSRAACGIDIGYRLVKDGLRVAVIADTSGKIDHLTLPQDWIEKMDHVESIQGHLDNSNDLAWGEL
KALLKSMHDYPESIAESIGRLLKAGDRTPVRGMRALHWRLRNEPETMPEVLSILDTWEAETCRREREMHRLRR
KLINRRKDLYRNFAYKVANRYVLIRIRGLSLKKLAAVNLEDGSDNQMPQAVRNNRTRASLSELTLCLQQAAVK
AGADFEKVFDVNSTTTCSTCGNQNLKMDREDIYFRCEKCDTLHDQDENAAKNLLRKEFYLAEQAVM (SEQ
ID NO: 18)
>3300009784|Ga0123357_10002363_9
[arthropoda-digestive system-termite gut]
MENHKFTIPDQANQGIIVYEYGIRLDKESKPLVWQQIQLSRKLYNNIVASMRQTFDAMNTFILERAGDEGKQL
NQAIEEGIERFKTAKAEQNEDDIKETVLFLREKRAKLSEQLKGVRTQYKEETKRNFFNRIGMRTSCETYQIRS
QAVKDGLGWATANEVLNSALKAFQARIKTGQPPKFAVGEEKQQDSLRTQFTQAGGCPVATLFESEHSGLSLRA
AAGFGRRKYGTFRFRLGEAKSDVWATGTCQFHREIPSGATVASAALVQRRIGRDLKHALQLVVKLPQQAEAQA
TQSKKFCTVHFGWASEEGIQYVMALADQENPTKAQLFQLPTDIETDFNRVENLASQRSKLLNDLVLQIKSGSI
VIPSQIKEVADEFDAIKRLPATHISLTRLHRICRLMIESDIFRPEALERWRRQDRLLLQDIAHIRRRALYRRR
DFYRVTASVIAKSYGAIVIETLDLKKANTKINMVTGEKSDKNKKSRSRQRMAALHELQRQLRQAAGKAGCVII
ELTGEKTTATCAFCNREGTTTTSESSQVLHCPHCGSQMNRKQNGAAVAWQLASPIIDDLVHEARSLAAVQSSE
RAASKILKAEKVATARKANRAAREPAATDK (SEQ ID NO: 19)
>ADIG01000806_20
[groundwater metagenome]
MIVQITPAPLPQGDVRIYEFGARLDHDCVRTVDEQIFKAHQLYNQLVACMQTTVRDMQAYLLDHAGPDAHAAK
ARVDGLNEAFNAARAANDENRMTTVATERREAWRALAAVLRIARKEHRTAMQETFLSRIGKKSACETYQLRCK
AVADGLGWATANATLDAALIAFKKSFALGRAPRFARIADSIQDTLTLQFTAAGGINIERLLDGKHTELALKPP
AVCGKRGYGTFAFRLGAASAETQATGTWQYHRPLPPGGTVGLARLVRRRIGPKTTWSLQLQVRSPLPEREHED
RRPLVTVHPGWAADLSGRRIAGIADAADPGLATVLQLPPDIEHGLQRAAELESTRSQARDALTPMLKVHPWPQ
ELLNAATPEEDASASGDSGPMAPERIMCRKVADEILALRRLPAQHIAIRRLHRLARWLRLAEVDVPDWLETWR
KEDKLRWQASAAAAKRARNRRRGFYRETALRLASQYQAIVIEPLNLADAAKKIDEATGERSDFAKKARAGRVV
AAIFELDSAIRWAATKCGTAVLDLTGETAQHCAICGGHSLKADDEDSQCLRCSDCGADIDRKRNGAALAWQAA
AAHLETHLEDFWRLTLENRASAAAKRDEKKTKLQEGRRAAMRETLET (SEQ ID NO: 20)
>CXWL01128655_18
[groundwater metagenome]
MIKAYKFGLLNPISGFDQAAMDVLYLRNKLWNQLVELEKNSRAAYRALMLDSSEELSVIQTRIDAIEVERADL
VSQKKKLRASVRSKKVDTAGIDAAVERLIAERTNLRAKAKQLREVVKVEIKPKAVELDKVRYAAVLALIKGSG
LWWGNSETVIAAYDVARVRAMKESAELRFRSFDGTGKFAYRESGGIDFDKFMSGKVNFARLNTLPDSDFAHLS
ERGRRSKARHHLTMTVLTSVDDAGKKVRHEVTWPIVMHRDMPAGAIKTIHVHRKRVGDQFNWTCSITIDVPEE
PKQLIDHPAKAACGIDLGFRLVKDGLRIATIADSDNRIEHVVLPLDWIEKMDYVEHLQSTLSETANLTWVRLR
KHLSELPDYPESIKERIHNILKAGERVPTRGMRSLLGALKAEPELLPEALQILAAWSDDIYRPAREMHNLRDK
LMKRRQDLYRNVSHCLSNKYAMVRVEDMDLRQIARVKKDDGSDNPLPDTVRDNRKRAALFEFVLSIKQSCVKT
GSVFEKMNPAYSSMTCSSCGHLNQPGMDIHYSCENCGTLHDQDENAAKNFLRGEYFSSPKQDVA (SEQ ID
NO: 21)
>OGCL01001770_13
[hot springs metagenome]
MIKAFKYGMLEPVAGFDKAAIDVLYLRNKLWNSLVELEKAHRERYRTLITGSDDELSKIQARLDQIEAERAEL
VKRKRQARAMVRSKKVDTSEHDDRIDMLMAERNDLRTKAKDIRLQVKEKVKPAIADLEKERYEAVKHLIHEAG
LWWCNSETVIAAYDLARVKAMKENAELRFRSFDGSGKFAVRKTGGFALSDLVSGKLSFARLEALPDANFAHLS
ERGKRSRARHHLTMTILTYKDESGKLCRHEVTWPIILHRPLPPEGMIKFIHVQRKRIGKDFQWTCSITMEVDE
IQKTPIDHPSRAACGIDIGYRLVKDGLRVAVIADTSGKIDHLTLPQDWIEKMDHVESIQGHLDNSNDLAWGEL
KALLKSMHDYPESIAESIGRLLKAGDRTPVRGMRALHWRLRNEPETMPEVLSILDTWEAETCRREREMHRLRR
KLINRRKDLYRNFAYKVANRYVLIRIRGLSLKKLAAVNLEDGSDNQMPQAVRNNRTRASLSELTLCLQQAAVK
AGADFEKVFDVNSTTTCSTCGNQNLKMDREDIYFRCEKCDTLHDQDENAAKNLLRKEFYLAEQAVM (SEQ
ID NO: 18)
>LNAP01002847_16
[soil metagenome]
MKKITIRKYGARLLGDSEPIIVKSMRDQNTLWNKLVEIERANTTEYRDIVAQSDDVLAALTQEYAAAEQRLKD
VQEMRNRVRAAKRSKQIEGAENYAAEIKAISSSLKDLRARMKECRARAKEAAKPRLEGLEDRRRAAVKQATNE
AAIWWAHSELVTNSFDVARVKALKSNAELRFHRFEGEGRIGVRIQDGILLGNQKGTSMLQVREATPEELGHLQ
AQRARKRLVAVDIRVGKRGEDGHIPKATFLVTIHEGMELLPNTPLKTVTVKREMHAGQPKWFMVFMFVESDAE
PEDKPLPPKAVGVDFGWRVVKDREWGERTGLRVATIANKDGTKQHITLPPELLARFERSTRLRSELDVAANEF
WVRTASLFTDDILATLSEDEWLRVLVGKAKRAHRPYPSLMEAITRAHAANPVLGPEADEQMQAWARRARRLNV
AAFGARRKAADHRKHLYRNVAARLVRECGLIAIKDTDFHKLAKLVDDDGKETELNKHARANRFMASPSELRQA
IKMAALREQRELVNVAPAHTTTTCSACGHVHGERPKDLIFVCDSCGKWHDQDENSAAICLKIALESKL (SEQ
ID NO: 22)
>3300007533|Ga0102944_1000048_72
[terrestrial-soil-pond soil]
MNDVTLSFRGLEPRESTSWSYGARVAGSEALEEQYTLAQRTYNNMVEVTRQALAAFNEWFAEKDPEIARLGTE
IERLGAQWAEAKARDDRDELARIAAERRPLRQQWYERCFAVRKDNRGEVNALLKQWVGSAKESRLYLARVEAV
KAGLYWATATAVMTAVQRAWDKQFPRLRPVAFSRRSEKRRETLVVQFTESGGVAMETLHTKHGGLWIEPPGEG
LLSAWANGRRPGRPDRYLRFRMRIGGRGREGVYVEGSVQMVRPVPEGARVMMARLVRERVATRYRYQLQLVLR
LAEPLSIPAEDKAPRVALDIGWYYEAGRGRRVIAYTAGANEDAVEQTYLDPSIDEAFDRVDDMNSRRSLARDD
VTIALRCCQWDGAPEALAEALSAINRLPVAHVSPARLAQMVWLWREHHGDYRPDVLEELWAWRRWDKKLYETS
AHLRRRTAGRRKKFYEGWARHFASRYATIVVVRPDLREAAMVKNAISGEHTALTARARQGRVRAALYEFLNVV
ATKAAEAGSVVIELTGRTTTECSACGEIMVVPEDNPATRLLVCHACGVSHDREANSAVLAFRVLDDEASVTKG
LAHAQEKADKARERRYKRRTAMRDARWKDEQTTTSGQ (SEQ ID NO: 23)
>3300007533|Ga0102944_1003721_10
[terrestrial-soil-pond soil]
MNQSPPANGECMENVTLSFRGLEPRESTSWNYGARVEASEALEEQFTLAHRTYNQMVEVTRHALAALTDWFCE
KDPEIARLGAAIERLSAQWSEAKARDARDELEQIAAERRFLRKDWYERCFAVRKDNRSEVNALIRQWVGLTKE
SRLYAVRTEAVKAGLYWASATAVMTAVQQAWDKQFPRLRPVAFSKRAEKTRETLVVQFTEAGGVPMSTLHSKH
GGLWIEPPGDGLLTAWANGRRPARPDRYLRFRMRIGGRGREGVYVEGSVQMVRPVPEGARVMMARLVRERVAT
KYRHQLQLVLRLAEPLSIPTETKEPRVALDLGWYYEAGLGRRVIAYTGGDNEDAVEQIYLPPGIDEAFDRVDD
MNSRRSLARDDVAITLRCCQWDDAPAPLAETLAAINKAPVAHVAQARLARLVWQWRNEHSDYRPDVLAELWSW
RRWDKKLYEASAHLRRRTAGQRKKFYEHWARYFASRYTTIVVVRPALREAAVIKNEASGEHTALTARARQGRV
RAALYDFLNAVATKAAETGSVVIEVSGRTTTECSACGAIMAVPEENPATRTLVCHACGVSHDREANSAVLAYR
VPDDDGAVTQSLEHAQEQADRARERRERRRQAMREGRWKGKQSAGGGD (SEQ ID NO: 24)
>3300007533|Ga0102944_1003721_8
[terrestrial-soil-pond soil]
MENVTLSFRGLEPRESTSWNYGARVEASEALEEQFTLAHRTYNQMVEVTRHALAALTDWFCEKDPEIARLGAA
IERLSAQWSEAKARDARDELEQIAAERRFLRKDWYERCFAVRKDNRSEVNALIRQWVGLTKESRLYAVRTEAV
KAGLYWASATAVMTAVQQAWDKQFPRLRPVAFSKRAEKTRETLVVQFTEAGGVPMSTLHSKHGGLWIEPPGDG
LLTAWANGRRPARPDRYLRFRMRIGGRGREGVYVEGSVQMVRPVPEGARVMMARLVRERVATKYRHQLQLVLR
LAEPLSIPTETKEPRVALDLGWYYEAGLGRRVIAYTGGDNEDAVEQTYLPPGIDEAFDRVDDMNSRRSLARDD
VAITLRCCQWDDAPAPLAETLAAINKAPVAHVAQARLARLVWQWRNEHSDYRPDVLAELWSWRRWDKKLYEAS
AHLRRRTAGQRKKFYEHWARYFASRYTTIVVVRPALREAAVIKNEASGEHTALTARARQGRVRAALYDFLNAV
ATKAAETGSVVIEVSGRTTTECSACGAIMAVPEENPATRTLVCHACGVSHDREANSAVLAYRVPDDDGAVTQS
LEHAQEQADRARERRERRRQAMREGRWKGKQSAGGGD (SEQ ID NO: 25)
>APMI01033782_24
[wastewater metagenome]
MKSTPDTISITPGATANGDMLTYEYGLRLDKESIAHVGAQIAMSRRLYNDLVAQIRTTVDALQAFVIDKAGDE
AVQIKVRIEELTTNFKAAKAEDNEPEMKRIAEDRRNQWKLLSALIKAASKANRAEINERFLSKIGKNSSCPTY
QLRGKAVAEGLGWGTANAVLDAALQAFKTSFALGRAPRFASGAEIDQDCLFLQFTAAGGVASASLLAGKQADL
QLLPTNGCGKRKYGEFKFRLGAAKADTYATGTWQYHRPLPDGSNIALARLVRRRIGMHDKWAIQLLVKPKTPI
RESVEERKPLVAVHFGWAADIAGRRVAAIADAADPGAATILALPPSIEEALDRAREIQGVRDKSRDEIAPQVR
SIEIPGSANETLIDLLGRVRKTRPQDISANRIHYLCRLLREADHLPDWLEAWRKEDKNRWQDQAHIAKRARNA
RKSFYREVAINLGRQYDAIAIEPLDLASAAMKVNEATGEKTDFAKKARAGRVVAALYEFESAIRWAATKTAAA
LIEVSGATASVCSVCGGHVEATKDDHQSIVCHDCGAVLDRKQNGAAIAWQSANDKREDVVTEFWSEYFADSEA
KKEKKAEKLAKMAEGRRNARTESAAEIA (SEQ ID NO: 26)
>NZ_JQKL01000024_23
[Clostridiales bacterium DRI-13]
METAATKNYLALSFGCLSPTRGEEYLLDQIKKKHDLWNKLVEKDREHREKVRQVMVFESETTKKIKELEEELN
SLREEIKNQRKTKRTGKVDLTDQKARIEEIKPQLKQLKEKFKEERSFIFEARKQELAQLEKERWAVVKELGKG
SGLYWCNLEDVVNSYDIGRKKAKAAGGEMRFHRWDGTGKVTVRFQKGLPVNEMFSCTNNLLQIDPVDKDAWYN
PVRAIRRKKSRTRVRLRACSENKKPLFIELPVVLHREIPEDALIRTASVIREKVGMRYRYKLNLVLEILGENT
NRILPALEGTAAIDLGWRTVKDGLRVACLVDDKGHSEELILDNDVLHEFNKIKDLQSIRDNLFNETKAKLMEL
LKTLELPDEAKERTSHMANWRSQQKMLRLHQYWRENRLPGDDEVWEVLEYWRKREIHLYEWQENLRDQVLRRR
KEIYRIFAAKITRKYKTIVLEEFTLNKTVQKPNPEEGPAGTLPANRNRFIAAISEFRNELANACRKNHVEFTY
VPAENTTITCHKCGHKEKFDAAAQIIHTCSTCGELWDQDYNAAKNLLAFSQKGGVK (SEQ ID NO: 48)
>WP_081908191.1
[Clostridiales bacterium DRI-13]
MSRLEARTRYLQAGQKRLGKIRKRGFFMETAATKNYLALSFGCLSPTRGEEYLLDQIKKKHDLWNKLVEKDRE
HREKVRQVMVFESETTKKIKELEEELNSLREEIKNQRKTKRTGKVDLTDQKARIEEIKPQLKQLKEKFKEERS
FIFEARKQELAQLEKERWAVVKELGKGSGLYWCNLEDVVNSYDIGRKKAKAAGGEMRFHRWDGTGKVTVRFQK
GLPVNEMFSCTNNLLQIDPVDKDAWYNPVRAIRRKKSRTRVRLRACSENKKPLFIELPVVLHREIPEDALIRT
ASVIREKVGMRYRYKLNLVLEILGENTNRILPALEGTAAIDLGWRTVKDGLRVACLVDDKGHSEELILDNDVL
HEFNKIKDLQSIRDNLFNETKAKLMELLKTLELPDEAKERTSHMANWRSQQKMLRLHQYWRENRLPGDDEVWE
VLEYWRKREIHLYEWQENLRDQVLRRRKEIYRIFAAKITRKYKTIVLEEFTLNKTVQKPNPEEGPAGTLPANR
NRFIAAISEFRNELANACRKNHVEFTYVPAENTTITCHKCGHKEKFDAAAQIIHTCSTCGELWDQDYNAAKNL
LAFSQKGGVK (SEQ ID NO: 49)
>GAB36148.1
[Gordornia otitidis NBRC 100426]
MTRVTVQTAGVHYKWQMPDQLTQQLRLAHDLREDLVTLEYEYEDAVKAVWSSYPAVAALEAQVAELDERASEL
ASTVKEEKSRQRTKRPSHPAVAQLAETRAQLKAAKASRREAIASVRDEATERLRTISDERYAAQKQLYRDYCT
DGLLYWATFNAVLDHHKTAVKRIAAHRKQGRAAQLRHHRWDGTGTISVQLQRQATDPARTPAIIADADTGKWR
SSLIVPWVNPDVWDTMDRASRRKAGRVVIRMRCGSSRNPDGTKTSEWIDVPVQQHRMLPADADITAAQLTVRR
EGADLRATIGITAKIPDQGEVDEGPTIAVHLGWRSSDHGTVVATWRSTEPLDIPETLRGVITTQSAERTVGSI
VVPHRIEQRVHHHATVASHRDLAVDSIRDTLVAWLTEHGPQPHPYDGDPITAASVQRWKAPRRFAWLALQWRD
TPPPEGADIAETLEAWRRADKKLWLESEHGRGRALRHRTDLHRQVAAYFAGVAGRIVVDDSDIAQIAGTAKHS
ELLTDVDRQIARRRAIAAPGMLRAAIVAAATRDEVPTTTVSHTGLSRVHAACGHENPADDRYLMQPVLCDGCG
RTYDTDLSATILMLQRASAATSN (SEQ ID NO: 50)
>BAFB01000202_4
[Gordornia otitidis NBRC 100426]
MPDQLTQQLRLAHDLREDLVTLEYEYEDAVKAVWSSYPAVAALEAQVAELDERASELASTVKEEKSRQRTKRP
SHPAVAQLAETRAQLKAAKASRREAIASVRDEATERLRTISDERYAAQKQLYRDYCTDGLLYWATFNAVLDHH
KTAVKRIAAHRKQGRAAQLRHHRWDGTGTISVQLQRQATDPARTPAIIADADTGKWRSSLIVPWVNPDVWDTM
DRASRRKAGRVVIRMRCGSSRNPDGTKTSEWIDVPVQQHRMLPADADITAAQLTVRREGADLRATIGITAKIP
DQGEVDEGPTIAVHLGWRSSDHGTVVATWRSTEPLDIPETLRGVITTQSAERTVGSIVVPHRIEQRVHHHATV
ASHRDLAVDSIRDTLVAWLTEHGPQPHPYDGDPITAASVQRWKAPRRFAWLALQWRDTPPPEGADIAETLEAW
RRADKKLWLESEHGRGRALRHRTDLHRQVAAYFAGVAGRIVVDDSDIAQIAGTAKHSELLTDVDRQIARRRAI
AAPGMLRAAIVAAATRDEVPTTTVSHTGLSRVHAACGHENPADDRYLMQPVLCDGCGRTYDTDLSATILMLQR
ASAATSN (SEQ ID NO: 51)
>WP_039994403.1
[Gordornia otitidis NBRC100426]
MHYKWQMPDQLTQQLRLAHDLREDLVTLEYEYEDAVKAVWSSYPAVAALEAQVAELDERASELASTVKEEKSR
QRTKRPSHPAVAQLAETRAQLKAAKASRREAIASVRDEATERLRTISDERYAAQKQLYRDYCTDGLLYWATFN
AVLDHHKTAVKRIAAHRKQGRAAQLRHHRWDGTGTISVQLQRQATDPARTPAIIADADTGKWRSSLIVPWVNP
DVWDTMDRASRRKAGRVVIRMRCGSSRNPDGTKTSEWIDVPVQQHRMLPADADITAAQLTVRREGADLRATIG
ITAKIPDQGEVDEGPTIAVHLGWRSSDHGTVVATWRSTEPLDIPETLRGVITTQSAERTVGSIVVPHRIEQRV
HHHATVASHRDLAVDSIRDTLVAWLTEHGPQPHPYDGDPITAASVQRWKAPRRFAWLALQWRDTPPPEGADIA
ETLEAWRRADKKLWLESEHGRGRALRHRTDLHRQVAAYFAGVAGRIVVDDSDIAQIAGTAKHSELLTDVDRQI
ARRRAIAAPGMLRAAIVAAATRDEVPTTTVSHTGLSRVHAACGHENPADDRYLMQPVLCDGCGRTYDTDLSAT
ILMLQRASAATSN (SEQ ID NO: 52)
>WP_013159911.1
[Meiothermus silvanus DSM 9946]
MPFGKKARHVKAYQFGADAPQEGMEAVLEQHRLRTDYYNALVEMELRQREERTALLANLAAESGLESPNQVYE
RLKAAGEKGIRKHPEYVAARERQKALYGHPRLLELQSRQREERNALRRSFGAKGLYSSNYLDVERAFDKARQS
PELRFRRYSPHEGRLAVLYTEGLPMREIGSDTRVQLPLPDPIIYRDRATRRKHQRVLMKFRVRSVERQPLWIT
VPVYLHRELPDGVCREVSLHWHRVADRLRWTVSVVVEVEGPPVASPTGRGAVAVDLGWRRVEGGLRAGFWVGE
DGAGGEIALSEGDLKQFSKVEDLRSIRDQHLNALKEALAAWLEAPPAPLPDWLAEETKTLPQWRSPARFAALF
RRWQSERVHADEAAYGLLEGWHKRDRHLWQYEANLREQMILRRREQYRVLAATLARQYDALIVEDFNLRAAAE
LDQGGSDLPDAARRYRTIASPSTLRDALVNAFAQRGKPVRKLNPAHTTTDCHACGGALVGDPAKELRLYCPTC
ERFYDQDENAARNLLRRAQEVQAQV (SEQ ID NO: 53)
>WP_096876841.1
[Methylomonas koyamae]
MIRTYKYSLKAPENFAEDCEDELRRMNDLWNRLIEIDRQRERSFKDLCRSTSAEYAAAQDEIEALREPIDNLY
DAIRAERIATRSKEPSDELRARRDELLGRRKALWEICKAIQKAIPKESQAPINEVYKTNVKLARQQSGCFWGN
YNAVIESFETAKSKAIKDGGRLHFKSFDGSGRFVNQIQGGMTVTELLAGSHSQAQLTNLVTTNKTKGRFAFTA
FTGKDDAGKRFRRQLFSEINYHRPIPADGVIKAVEVVKVPHDGKQKYKWHACFTVALPEVDIKHPKRNIAGVN
LGWRQFGGRLRVAVVVDDAGKKTEYFVPAELVSKFEAAETIQKAADDARNEMLSWLRTFYQDNRDEAPQEWRE
SIQGLLRNRPSVDAANHLMTIWRECVFAQEESRRYAAWLKSDAALRRSYTGCRQNAVKWREEIYRHIAKELAE
RYAVLAVTDTPLSTMSRTKAKDDLAVDNALPESARRNRVIAAIYSLKEWIGKQAAKTGSTVETITGKMTATCH
KCGYVAEKRLRGSQYATCKSCGSELELDENAAINCRNHASGAVLISDKPEKTGRFQRAKMAENDFARKIGDNA
SPLVT (SEQ ID NO: 54)
>WP_048895525.1
[Mycobacterium conceptionense]
MAITVHTAGVHYRWTDNPPEQLMRQLRLAHDLREDLVTLQLDYETAKAGIWSSYPAVAAAETELADAESAAEQ
AAAAVSEERTKLRTKRITGPLAQKLTAARKRVREARSTRRAAISEVHEEAKGRLVDASDALKAQQKALYKTYC
QDGDLFWATFNDVLDHHKAAVKRIGQMRAAGQPAQLRHHRFDGTGSIAVQLQRQAGQPQRTPELIADVDGKYG
RVLSVPWVQPDRWERIPRRERRMIGRVTVRMRAGQLSGEPQWLDIPVQQHRMLPLDADITGARLTVTRTAGTL
RAQISVTAKIPDPEPVTDGPDVAVHLGWRNTDTGVRVARWRSTEPIEVPFDFRDTLTVDPGGRSGEIFVPEAV
PRRVERAHLIASHRADRMNELRARLVDYLAETGPRPHPSREGEELGAGNVRMWKSPNRFAWLARVWADDESVS
TDIREALAQWRHQDWISWHHQEGGRRRSAAQRLDVYRQVAAVLVSQAGRLVLDDTSYADIAQRSATTKTEELP
NETAARINRRRAHAAPGELRQTLVAAADRDAVPVDTVSHTGVSVVHAKCGHENPSDGRFMSVVVACDGCGEKY
DQDESALTHMLTRAVQSAA (SEQ ID NO: 55)
>WP_061006603.1
[Mycobacterium mucogenicum]
MTTMTVHTMGVHYKWQIPEVLRQQLWLAHNLREDLVSLQLAYDDDLKAIWSSYPDVAQAEDTMAAAEADAVAL
SERVKQARIEARSKKISTELTQQLRDAKKRLKDARQARRDAIAVVKDDAAERRKARSDQLAADQKALYGQYCR
DGDLYWASFNTVLDHHKTAVKRIAAQRASGKPATLRHHRFDGSGTIAVQLQRQAGAPPRTPMVLADEAGKYRN
VLHIPGWTDPDVWEQMTRSQCRQSGRVTVRMRCGSTDGQPQWIDLPVQVHRWLPADADITGAELVVTRVAGIY
RAKLCVTARIGDTEPVTSGPTVALHLGWRSTEEGTAVATWRSDAPLDIPFGLRTVMRVDAAGTSGIIVVPATI
ERRLTRTENIASSRSLALDALRDKVVGWLSDNDAPTYRDAPLEAATVKQWKSPQRFASLAHAWKDNGTEISDI
LWAWFSLDRKQWAQQENGRRKALGHRDDLYRQIAAVISDQAGHVLVDDTSVAELSARAMERTELPTEVQQKID
RRRDHAAPGGLRASVVAAMTRDGVPVTIVAAADFTRTHSRCGHVNPADDRYLSNPVRCDGCGAMYDQDRSFVT
LMLRAATAPSNP (SEQ ID NO: 56)
>WP_011733919.1
[Pelobacter propionicus DSM 23791]
MKRVTITIDGEQTKGIVIGTIAANHTAAEWLLTASVSAKSAKVRFDPEEAVAETSSLVMIAPTRTEKYLYLVP
DEQVQPVTTIVRKYGLLSPLDWDCPDYPAGDAFEHLFLQNKLWNDLVTIEREHRAKYRELIGSDEETAQMDTE
IASIKDRLSVLDEGRKKLRVEHRKKKCPEIDCLDENIKKLKSELKAVASKAKETRAAAKDRIRAAGNDIENLE
KDRQAAVIKAYNNSGLWWGNYNAVLESYKKARIKALKDGAELKYHRFDGSGRFTNQIQGGMSVQDLLEGNRNV
ASLRLVSSGELGDISGKKPPSLDLQSVGSRRDSREYGILAITLYTGTDEQSKKFRRTLSFPVILHRPLPEGAT
LKSLSVHRKRVGTDFVWSVVFTFTTDCPTYDQRSSTGNRCGLNLGWKKQAGGGLRVATIYDGSDARHITLPQA
IIDGLDYVNGDLQGRIDSAANENHAWLLEQWGGDELPESLQELRSMLRRSKRPHPAKFAKAVIAWRNYPEYLG
DARDEAEQRRKATKRLTIEMAHKREKLLRRRMDFYRNTAKQLTSVYDVICLDKMDLRRLALLEKGDGTPNELT
KIARKQRQQAAISELRECLSKAAAKNGTQIEQVSTASSATCSACKGKMEQVDGIMWRCRECRALVDQDINAAA
NLFREVL (SEQ ID NO: 57)
>WP_018234394.1
[Thioalkalivibrio thiocyanodenitrificans ARhD1]
MKRQQEDTEALVYAYGARIPLDDPHLQEELRKQRAFWDALVEATLAAERELDDRMKADSPQYAAAVQALIDAS
QAVREAIERRNAERAKTRSRTTSVDGEVKERITEKNAARKEVWRLAGEWRKANKEAVSEHQARMKEEAKRLRQ
GCGLYWGNYNRVLDSFQRARQQTLKKGRRVRPSDPARDDGILAVQIQRTKSGLGASPEELFSGNVSQLQIDRP
PPGVEFLPANRRRREARVTARMRVDAAGHMIEFPVVLHRPVPPGARIKAAQLVWKREGERWRGQLCLTVSSPK
QEREHPGVEACGIDLGWRLQKDGALRVATVADSKSRLYTYTLPADWMRGMDQVERLSSHLDENAMEVAAWVHA
HRDELPEKLTQPAANWSPGKGSKWLRDKELHDAVRALNWEVPAEIRHWYERYRHLKTWRDNLRAKLLRSRREV
YRLLAADLAGRYAVIGIEDMDLSKIAKTKKRKDASDPELHATARAQRQRAAVHALRHEIEHQANKHGAQLVHV
SGKTTTTCRACGAATGQKDRASLIWTCEHCGAVWDQDLNAAGNILDSAMGASAPAATTLAKAKSRRYDLTQPN
FRERSKTGSRASARA (SEQ ID NO: 58)
>3300000944|BBAY81_10000005_89
[algae-green algae-macroalgl1 surface-ecklonta radiata 2]
MPVINWVYRSEEPTNVAAVKNQILLNHRYRNQLIELEHNRRATYKTLAASLCPAYADAVTIYDRAVAELDEAY
KDLRLSRQRARRRHEPTDSQKARINQAKAVRKTAIAQLDAAYKVAKKLIRDAHKVYQDQAAQEITQLADETES
QLKRQRKVRYFELVEEAGLDDGQIAHAREAKIARQQSGVYWGTSRIMEQIAEKTYKKGPPPKFRRWEGSGAIG
VRFQGGKPVAAVMENNSEILHIHIPPGSERLVIGQDRGEVAKGTIRFLVCRDDDGNPVFATFPYVHHRDFPAS
AKIIDGFAHLKRVGKKEYWEIRLTIKVDDVVSTVDKSNTCVLHLGHRMIDEQLRCATVMDATQQVSQLFLSSD
KLRRFSRPDSLQGIRADRFNIIRGEFLDWLASIDVPEWLVERTQTLASHQSPESLYRTVELWRDNRFVMDTET
SAQFFTNSLPWAESKLNSPAVRRKRHPSDIQTVFGIMEFWRSWDRHTLQESASINKKAIRNRKHVYRDWLRRL
SGRYTHLIVDSTNWATLGKKEKDDEKVVLVANQRRLARIASPGLLRQCAVEIFGQSNVSVVTSVNMTRTCSTC
GQVTEDWDSAKLEYHCSHCTYTVDQDINAANIMLSRIPDAVPYTEFAEAKRR (SEQ ID NO: 59)
>LSQX01035253_23
[anaerobic digester metagenome]
MITVFKYGVHYRWQVPEVLREQLWLGHQLREDLVTLQLEYEAGLKAIWSSYPDVAAAEESLATAAAEALEAAE
EVSRQRQVQRTKRITGPAADALAAARKRAKEARVVRRSAIAAVKDEAAERISALAAGLRASQKAKYAEYAQGK
GLYWATFGDVLDHHKTAVKMVAAKRAAGRPAALRHHRFDGTGAVAVQLQRPAGKPQRTPALISDPVASNWRNV
LHLPWVDPEQWEQMTRAEQRAQGRVIVRMRCGADIIEVPVQVHRMLPADADITGARLVVAREGSDYRISLTVT
ARIGDPEPVTAGPTVALHFGWRGSDAGPVVVRWQSDAPVDIPNDCSAFMVGDRWGGKIVMPSVIVDRLESAAA
IQAGRDEQLNTVRAAVVEWLTVNGPVPHPIRDGEEISSADASRWRRPARFAALAGWWRDAPPAGGEQIAEVLE
AWRASDKRLWNTQVHTAGRALRRRDDLYRQVAAIFADQAGLVVVDDTDMGAVAASRSDAPTAVTDPAARRRTY
AAPGVLRASIVAAAAREGVPVRSVSHKGMSVIHAECGTVNECDDRFLSALIKCEGCGKVYNQDVNALEVVMRE
GRRHTSVA (SEQ ID NO: 60)
>3300013131|Ga0172373_10056063_2
[aquatic-freshwater]
MGSRVFQFGCPFGPSAGLDETIEQMRLGRAYYNARQEVSRQVRNQTRSIYASCGSVSDLERAVEEAKERKDAL
ELEIKTARAETRTRWTKKSSAQDLKEARTVLKDARAELGAFRSRLREDPIVAAKLATITGGRPKRKDGEASRR
HDNTVKNNGTKALAMRALRAEYGPRGKGLGSGTYLLVEAAQGVSEADTPLYDREGQPQDPGFRCWSMGSKHVA
VHVQGFELTGATIFQPNDWAWIKPVDPRAWLKETPRGERKRLSRTMLHLRLKTGEDREPVWAVVPIIVHREIP
LTAKVTWIVLSMCQQGPRAVWTCEITVNEEAPQSVPEGRGTAAVVFGWRNVSGGILAATWLNTDGVAGQLVLG
DGDLDTTDADGGKGGIISGLTRVDSLKETRDKNLNAALASLVSWLRDHDMPEWMRLRTVKRQYDENHQEVQRV
LPSKAQALAYLAGWKAQGKLAALCLAWRENRFSGDDDAFRALESWRYHDNHLWRWQAAQNESAHLRRRERYRI
VGIELAKHARVLLDGTDFARIAFRPKTEDDKGYVQGPATNRTLVAPSELRDTVKQAAAKMLRDAVKVESANTA
ITCPRCGNVSKVQRFDDGDFKHSFCCVECGLTGDQDSIRCMNMLVADGHKDAVLEILRRQEEALRYQRRLSNG
GDYGEDASNRSENAGVQGAAREVQCDRRRGVLLPHDVGG (SEQ ID NO: 61)
>3300013136|Ga0172370_10027535_4
[aquatic-freshwater]
MVTKRLAYGLLEPTENLETVEDQMSKAHKYYNKLVEIENSIRPLRRESYNNGVKRLSPEYEGLEQQLLALQAS
KDTIENEIKQQRVLNRSKKLDSSNHKQTLAGIKLQIKLVYEKQKEERAKFKGKLKRPSKEKVEPEPHKRPSKE
KVEPEPHKRPSKEKVEPEPQWLAEQEEIDEKRNKLISEARKASGLYWGTYLSTEDAFKNACKATPPHKNLHFQ
RWTGEGKIRVCRNSEPTVSNSLFFIDPLPGDSWEKKKDKGVPSPRGEGKRSRMKTQLHLLVNSNRQKKIAPVW
ATFPMMLSRPLPDNGRIDSVEVIRKRCGPNWKWAAQVTCTFEETNKPPKGKAIVALDLGWRKIDGNIRVAAFG
AIDDAPISLPSESCPDLQQAVVKVGNGYELQLTPEVISGIRKSEELRSIRDSEFNDIRSILTRWLQENDVPEE
IRTLKKRGKLNVMSQLQFIHWINSLRSQAQLASLIYRWKDNRFEGYEEILEALENWRYADQHLWEWESEQRRG
AIARRNNLFKNFASWLRSIATMVVIEGDFKITDVAERKGLIEDTNRNEIAQSNRQLAGTSILRICIKNKLGND
CIGVPAKNTSKECHVCGEVVEFADPAALEQECHNHHQWDRDHNAWKVLLKRYASGDVIVKTLGTARKGKKKRN
SKKLATGEQKIVG (SEQ ID NO: 62)
>3300013137|Ga0172375_10012175_6
[aquatic-freshwater]
MGSRVFQFGCPFGPSAGLDETIEQMRLGRAYYNARQEVSRQVRNQTRSIYASCGSVSDLERAVEEAKERKDAL
ELEIKTARAETRTRWTKKSSAQDLKEARTVLKDARAELGAFRSRLREDPIVAAKLATITGGRPKRKDGEASRR
HDNTVKNNGTKALAMRALRAEYGPRGKGLGSGTYLLVEAAQGVSEADTPLYDREGQPQDPGFRCWSMGSKHVA
VHVQGFELTGATIFQPNDWAWIKPVDPRAWLKETPRGERKRLSRTMLHLRLKTGEDREPVWAVVPIIVHREIP
LTAKVTWIVLSMCQQGPRAVWTCEITVNEEAPQSVPEGRGTAAVVFGWRNVSGGILAATWLNTDGVAGQLVLG
DGDLDTTDADGGKGGIISGLTRVDSLKETRDKNLNAALASLVSWLRDHDMPEWMRLRTVKRQYDENHQEVQRV
LPSKAQALAYLAGWKAQGKLAALCLAWRENRFSGDDDAFRALESWRYHDNHLWRWQAAQNESAHLRRRERYRI
VGIELAKHARVLLDGTDFARIAFRPKTEDDKGYVQGPATNRTLVAPSELRDTVKQAAAKMLRDAVKVESANTA
ITCPRCGNVSKVQRFDDGDFKHSFCCVECGLTGDQDSIRCMNMLVADGHKDAVLEILRRQEEALRYQPAAE
(SEQ ID NO: 63)
>3300010293|Ga0116204_1010874_1
[aquatic-freshwater-anoxic lake water]
MLDQLRLASVYRNKLVEIELARRAATDDTLRELCPGLLECEAELADVNAKIAEATAEHKAKNAKARCLTDDKE
IKAALTQLKCIRKELATTRKRLRDDGFSPLTEADLSLVPGLAEATKIHAAAENPHAKAKAAAVMHECRSSWLN
DPSRPTPIRRLAIQIQLAEIGYAANEAQKTARKTSGLAPGSYLLVDQAADAFRKGAPPVFRGYQGEGRVGVQI
VGGMNSEEANSGRDTRLRIVHTPQAEQRVAKNGRVLPAPGAKRQAQQYTLWLRIGSDGRTPTWATWPLILHRP
IPETTRIMWAIVQRRIVGGHERWQLTLNLRDDTNAAFARRDVTASGVCGVDIGYRYIDDRAQRVAYWHGSDGA
SGELQLPSGKVAQWKKVDDLQSIRDGLHNEARAALRDWLATNAHPEWLDEATEHMHAWRRLSRLDRLVAQWRG
QRFDGDAEIMATLESWRTRERHLWQYQEQMRDQLLAWRKDFYRNFAAMLRRRYRTIAVEDMDLRSAIHDVLRP
EEERETVTAQRRAARFAALSVLVAAIKDSGADVVAVEQAGTTSTCSWCGASNEVGTGVIHTCVGCGREWDRDD
NAARNICARGEVAVKTR (SEQ ID NO: 64)
>3300010293|Ga0116204_1010874_2
[aquatic-freshwater-anoxic lake water]
MSSKNYTYGLQTPVGNRDRVLDQLRLASVYRNKLVEIELARRAATDDTLRELCPGLLECEAELADVNAKIAEA
IAEHKAKNAKARCLTDDKEIKAALTQLKCIRKELATTRKRLRDDGFSPLTEADLSLVPGLAEATKIHAAAENP
HAKAKAAAVMHECRSSWLNDPSRPTPIRRLAIQIQLAEIGYAANEAQKTARKTSGLAPGSYLLVDQAADAFRK
GAPPVFRGYQGEGRVGVQIVGGMNSEEANSGRDTRLRIVHTPQAEQRVAKNGRVLPAPGAKRQAQQYTLWLRI
GSDGRTPTWATWPLILHRPIPETTRIMWAIVQRRIVGGHERWQLTLNLRDDTNAAFARRDVTASGVCGVDIGY
RYIDDRAQRVAYWHGSDGASGELQLPSGKVAQWKKVDDLQSIRDGLHNEARAALRDWLATNAHPEWLDEATEH
MHAWRRLSRLDRLVAQWRGQRFDGDAEIMATLESWRTRERHLWQYQEQMRDQLLAWRKDFYRNFAAMLRRRYR
TIAVEDMDLRSAIHDVLRPEEERETVTAQRRAARFAALSVLVAAIKDSGADVVAVEQAGTTSTCSWCGASNEV
GTGVIHTCVGCGREWDRDDNAARNICARGEVAVKTR (SEQ ID NO: 65)
>3300008255|Ga0100403_1011992_3
[aquatic-freshwater-aquifer]
MTRVFEYGLPFDPFDGAELVDEQILLAHRYYNKLIELEHTRRSSILAVQRADPKVGPLLAAYDAANAEVEDLL
ARKREAKSRDRRVAAPELSEIEAAKEARRHLSVQLRKVKKVATDRLKPEYDLAEQATRDAKKAARAASGVFWG
TYSLIEQAADAAAKAKPVLRPGTHPRPWDQQPSFRRWTGEGMVAVQININRPLNDVTVFGDDLRLRITPVDPA
AWSDATSRGDRKCLARTNVTMRVGRNTGETATWPMVMHRPLPAGSRVTWAKVLRWRLDDRPHWFKYVLQLTVE
TADAPRHPGLVSLPPAIVAINCGWRALPNGSLRVVTWVGSDGAEGVLDLGCREYRDRIERAESIRSVRDQLRN
ELTSKLVGIGIDVTRWRSFDRFHRLFRELTAEGCERNEAVELLEAWHHRDRHLRQYQDGARGGALRFRREQYR
LLAVELARRYPVVCVESWDLRPVVTDEDRLPGPAAARVEGASSTARLALASAATREGCVVLTQIAAHVRLQTQ
TCHVCGYGAKKGEEWDAAAELVHTCEGCGETWNQDVNFCRNILAASRAAVTEIPELLVPKIMKRSARFAARHK
KVAT (SEQ ID NO: 66)
>3300014155|Ga0181524_10003409_23
[aquatic-freshwater-bog]
MLVYKWGIGPLPLEARQIIDREVRAAHRYRNRLVEIERSRRAAYRDLRNSLSPELAHLHAAYAAADRAVVEGR
RLLSGVPRAERARHPVAAEVRRLSAARSGAWKAYAEARDRTTADVFGAADQKYREAKQSVTAAVGFACAVARF
ARGADPGPIGPHVLAAITAAVRERALADPAVGEPWKAKTRSQMEHEALAKRARAECGCAVGTYLAVEAAAEKS
FAECAGDPPFSRLECERVGLQVRGGGLSADDVVGAAVGQVRVEFPADMTARANGTRYAVVHLHLSGRGDQATW
LHLPVVWHRDMAPEARVRWAYVVARRVGLVWHYELQLTCDSVDRARAQSAGARGTIALNLGWRALKNGDLRVA
TPWSGSASRAEDRLVLPRSFREGSDLADRLLSYADEHFLAVRDALAGWFKGGERSLFSPEQVAAWSLDTVHAW
RSHGRLARVALDLRRDWLEARGVDVPALWKAWRLERSPKLDLFGPLDEIKAWLAGRGVVSADQVLAVYLDWWR
AKDRHLVNWARNNDLRLRRSRRDRYRCYARDLAARYERVVIEQWNKSETAETPDPEADTRTEQEVRGNSNRVL
ACVSELVDALEAAFGEANVHRAPSERITVEHHGCGGESSDPLPQIPVTCFACGQVYDQDLNAAKHLYDRHSGE
PSGGVNVGGGARGAKKSRRVEGFGRAAE (SEQ ID NO: 67)
>3300014156|Ga0181518_10000096_28
[aquatic-freshwater-bog]
MLVYKWGIGPLPLEARQIIDREVRAAHRYRNRLVEIERSRRAAYRDLRNSLSPELAHLHAAYAAADRAVVEGR
RLLSGVPRAERARHPVAAEVRRLSAARSGAWKAYAEARDRTTADVFGAADQKYREAKQSVTAAVGFACAVARF
ARGADPGPIGPHVLAAITAAVRERALADPAVGEPWKAKTRSQMEHEALAKRARAECGCAVGTYLAVEAAAEKS
FAECAGDPPFSRLECERVGLQVRGGGLSADDVVGAAVGQVRVEFPADMTARANGTRYAVVHLHLSGRGDQATW
LHLPVVWHRDMAPEARVRWAYVVARRVGLVWHYELQLTCDSVDRARAQSAGARGTIALNLGWRALKNGDLRVA
TPWSGSASRAEDRLVLPRSFREGSDLADRLLSYADEHFLAVRDALAGWFKGGERSLFSPEQVAAWSLDTVHAW
RSHGRLARVALDLRRDWLEARGVDVPALWKAWRLERSPKLDLFGPLDEIKAWLAGRGVVSADQVLAVYLDWWR
AKDRHLVNWARNNDLRLRRSRRDRYRCYARDLAARYERVVIEQWNKSETAETPDPEADTRTEQEVRGNSNRVL
ACVSELVDALEAAFGEANVHRAPSERITVEHHGCGGESSDPLPQIPVTCFACGQVYDQDLNAAKHLYDRHSGE
PSGGVNVGGGARGAKKSRRVEGFGRAAE (SEQ ID NO: 67)
>3300014158|Ga0181521_10000063_92
[aquatic-freshwater-bog]
MLVYKWGIGPLPLEARQIIDREVRAAHRYRNRLVEIERSRRAAYRDLRNSLSPELAHLHAAYAAADRAVVEGR
RLLSGVPRAERARHPVAAEVRRLSAARSGAWKAYAEARDRTTADVFGAADQKYREAKQSVTAAVGFACAVARF
ARGADPGPIGPHVLAAITAAVRERALADPAVGEPWKAKTRSQMEHEALAKRARAECGCAVGTYLAVEAAAEKS
FAECAGDPPFSRLECERVGLQVRGGGLSADDVVGAAVGQVRVEFPADMTARANGTRYAVVHLHLSGRGDQATW
LHLPVVWHRDMAPEARVRWAYVVARRVGLVWHYELQLTCDSVDRARAQSAGARGTIALNLGWRALKNGDLRVA
TPWSGSASRAEDRLVLPRSFREGSDLADRLLSYADEHFLAVRDALAGWFKGGERSLFSPEQVAAWSLDTVHAW
RSHGRLARVALDLRRDWLEARGVDVPALWKAWRLERSPKLDLFGPLDEIKAWLAGRGVVSADQVLAVYLDWWR
AKDRHLVNWARNNDLRLRRSRRDRYRCYARDLAARYERVVIEQWNKSETAETPDPEADTRTEQEVRGNSNRVL
ACVSELVDALEAAFGEANVHRAPSERITVEHHGCGGESSDPLPQIPVTCFACGQVYDQDLNAAKHLYDRHSGE
PSGGVNVGGGARGAKKSRRVEGFGRAAE (SEQ ID NO: 67)
>3300014159|Ga0181530_10000119_98
[aquatic-freshwater-bog]
MLVYKWGIGPLPLEARQIIDREVRAAHRYRNRLVEIERSRRAAYRDLRNSLSPELAHLHAAYAAADRAVVEGR
RLLSGVPRAERARHPVAAEVRRLSAARSGAWKAYAEARDRTTADVFGAADQKYREAKQSVTAAVGFACAVARF
ARGADPGPIGPHVLAAITAAVRERALADPAVGEPWKAKTRSQMEHEALAKRARAECGCAVGTYLAVEAAAEKS
FAECAGDPPFSRLECERVGLQVRGGGLSADDVVGAAVGQVRVEFPADMTARANGTRYAVVHLHLSGRGDQATW
LHLPVVWHRDMAPEARVRWAYVVARRVGLVWHYELQLTCDSVDRARAQSAGARGTIALNLGWRALKNGDLRVA
TPWSGSASRAEDRLVLPRSFREGSDLADRLLSYADEHFLAVRDALAGWFKGGERSLFSPEQVAAWSLDTVHAW
RSHGRLARVALDLRRDWLEARGVDVPALWKAWRLERSPKLDLFGPLDEIKAWLAGRGVVSADQVLAVYLDWWR
AKDRHLVNWARNNDLRLRRSRRDRYRCYARDLAARYERVVIEQWNKSETAETPDPEADTRTEQEVRGNSNRVL
ACVSELVDALEAAFGEANVHRAPSERITVEHHGCGGESSDPLPQIPVTCFACGQVYDQDLNAAKHLYDRHSGE
PSGGVNVGGGARGAKKSRRVEGFGRAAE (SEQ ID NO: 67)
>3300014201|Ga0181537_10003972_13
[aquatic-freshwater-bog]
MSENMPTLVYRYGIAAPHDNADLVYEQLRLAHEYRCSLVRIERTRRAEERAARLAVSAEVAAAEAAVAAADAE
CERLATEIRKARSDARKRVETQQMRDALAKAREVRKERKTALFELRDRYQPQCRDCRATKSEDKPCPHVGQEA
QSFCLVLDAIAERAKESIRKARAESGLYWGSYLLVDRAMAASRKAPLYGDDGITPNDPKMPRFDGGGAVAIQF
QSSSVRPSNVRLADLGPDNARLQIVLPPWPEQCMPAPESHQGPFDPSRPPAGMRPDGTLAPATRADGSPARWL
RRRANRQALVRMCVKTEGRGKPVWAAWRLDYDRPLPAQATISWATIHRRMRGPHAEWSLCLTVEVAAEPAAEI
RSGQVAIDVGWRQMPCPGGAACHGQRTDCHELRVAAWRDHGGGSGELRLSARDIRALRQPAELRSKRDTQFDA
IKAAVAGWIRSASDAPEWMREAAKVMHAWRWQGRMVALVRQWAQERPNRAAPEEAVYQAALAWQTADWALWES
ERARDAWAHRRRREIYRVWAARMAETYGTLILERFDLRDVTERAPVGQDDSENETARSNRHLAAVSELRGALC
NAVRTRGSEVVGVTAVNSTRTCPSCGLVSDRNQAQAVQLACECGHVWDQDVEGAAPWLLAEYRERPGDAKLQA
GARAEAIAAARKGKKGNDWARAKRMGAAKKGRLQAARESAATEAQ (SEQ ID NO: 68)
>3300014201|Ga0181537_10021284_1
[aquatic-freshwater-bog]
MKLVYKYGLATPHDNRELVEEQMRAAHRYRNTLTEIERGRRAAVRQAEAEAGDMPKALQALRASEAELEAALT
AIRRHRARTSKRDEPVALKASAKAAREAKRAASKAFRDLRRRIAEDPMVVAAKDAIGERANELGRSARAHSGV
YWGSYLLVEAAASASFEDTPMYASDGRPTDPAFVRWTGEGEVGVQLQGGLGADEATACTDTQLQITQPDERAW
ERRGRTHRECEQMARQAQLRMRVQSDAKGKPVWATWRMDMHRPLPEGAIIKLATVHRVRVGPHSKWYVTITLD
VPARARVSPSSGTVAVDVGWRVVGDELRVAGWQDTTGARGELRLSPRDIAMLRAPEAMRSERDRRFDAARANL
LGWLRSHQELVPEWLAKATTTLHAWRSEARLVALYSRWSGSRFEGDEQPYYALASWRARARHEWAVESCARDQ
ALRRRRERYRVWAAQLASKYNTIVIEKFDKREVAVIPAPDVQVEQNAEQAARDKAARSNRFLAATSELCDCLV
TAARSRGCTVIAVPCEDTTRTCPVCGLVESRDAAAAIELTCECGASWDQDVDGAPAVLLARARERPGDTKILV
GAREDEKKNENGQKPESQWQRVRRMRAEKEARMGTAREAAPEGAE (SEQ ID NO: 69)
>3300014201|Ga0181537_10040512_3
[aquatic-freshwater-bog]
MTTRVYQFALLPPSGRDAALVDAQMRLAWEARQDMAMIERGRRSAMRALLDTPDVRAAEEALKAATRSTRKDV
IRVVSRARRDALERAVASERYDDEACQETGYCPLYEPERIEQLAKLATKGAYHYFGDRGLAWGTRLDVSGAAD
AARKAPLYDDDGLTPSDPHVERWYDAKRPPDSQLAVQLQGGLSTPDGLTGQDTRVRLVDGVLWLRVGSDGRAP
VWAKFAIARPHRTGKRGVRTTHRAIPDDAKWKWVRVSRRRDGPWMRWSVEITLDVEREDWRVRDPQVQGVLAV
EVCWDRPDDAIVVARWRDDSGRSGTIELPDRIATGLPKVHGIRAVRDTIRADMAKRLQRALTEDRDPKPVWLA
DAAGSMHLWKSSSRFHRLIQQWQDERCDAARPAYELLDAWRLRDNHLYEYETGARGNVLRWRKNWYQTLAAEW
ARRYRIVVLDDRNLSREARWGEASEIRFMASPFELRQAIRNAFGRDVAEHTVKQTEKEKDEDDRDWCERALDA
RNAGVARTERETSEIKDKRGGAWAKRKQAKTTRHAEREAARKAVVKAAE (SEQ ID NO: 70)
>3300014654|Ga0181525_10000532_4
[aquatic-freshwater-bog]
MAVYVYQFGLSAPFGENADLVYDQLFATHRYRNTLIEIERGRRAAVRAVIDASNAQTVALTAEVARWNAETEA
LAKRIKSQRASTRTRSESESDREALRQAREARKAAVTKLREARLAQRTDAAMTAAIDAINERANGLVRGAREL
TETYWGTYLLTEKAMQDSKALPLYGDDGISPNDPKFLRWEGDGALGVQIQGGAKAATILAEASTLLRMRPDAR
AYLERACDQRRIKDKTGLLTMRVGSDAKGGPIWATWHMHMHRLIPENAMIKGATVHLRKVGTKAEWSLEVTVE
HSRAALPPNDKTIAIDIGWRMIGDELRVAGWMDSDGKTGELRLSAKDIRLLRRPEEIRGERDRHFTLAKTALG
SFLASAAQVPDRLRAETAHLDRWGSADRLAAVVARWERFEGDAAIHNVMTAWFWRDRNLCDQEAGMRLQALRR
RKNKYREWAAWVTETYGTVVVEKFDLRAVALRGAVEDPAANETARSNRQLAALSEARTAIVNAASSRGRLIAA
MPAHDTTRACPSCGVVEAREAEASIVLVCPDCGATWDQDVTGAPVVLLGRWRERPGDAKILVSARDGANDNES
ETMRPNRWQKVKEARTAKVLRRESARAEASNGAE (SEQ ID NO: 71)
>3300014657|Ga0181522_10000394_52
[aquatic-freshwater-bog]
MKELRGNHELRNRLVEIERERRKAVRALCADLPELAAAQVCRTALDEALQTIKKARSETKKRSESAEDVKRAK
EARKAYQEALRALALARRARLSACEAEIKVVNDESAKREKEAYGESPVEAWGSKLDVFAAHAAVRAMPYWDEL
ADNDPHFVRWEGEGQIAVQLQGGLRVGAALSGGDRRFQLTDLVPEAFEATDAAKNPRDRRRLRGAVGRLRIGS
DARNPIWTEVRVQVHRPLPPSGIIKWARLSRRRVALAYAWSLEVTVDVPLSAVARPGVVGLDLGWRKKPDGSL
RVGYLAFRETAKDAIATRTRELVLPASLVQRFARLREAESERTHAFEMERMWLSRLLSTFVELPDWLKKESET
LSQWRSPARLARLARIWSENRFERDELPYERLRGWAAGDALRYQENEEARQSALRAREWYYGNWAAACANAYG
ALAVENMNISRLIRHRDPDADEPAHEERARSRAVAAPGRLRQVFAHAFEGRGGIVMLRPTKNTTITCPTCGDV
RKFDAAEILAPTCANGHTIDQDERAARNLCEGVSGEEAAEAARAREVRESTPKESRWAKVKRMKREKEEGALA
RGVGSAG (SEQ ID NO: 72)
>3300014657|Ga0181522_10000394_53
[aquatic-freshwater-bog]
MNRVYRYSCSPPKTEAERVMKELRGNHELRNRLVEIERERRKAVRALCADLPELAAAQVCRTALDEALQTIKK
ARSETKKRSESAEDVKRAKEARKAYQEALRALALARRARLSACEAEIKVVNDESAKREKEAYGESPVEAWGSK
LDVFAAHAAVRAMPYWDELADNDPHFVRWEGEGQIAVQLQGGLRVGAALSGGDRRFQLTDLVPEAFEATDAAK
NPRDRRRLRGAVGRLRIGSDARNPIWTEVRVQVHRPLPPSGIIKWARLSRRRVALAYAWSLEVTVDVPLSAVA
RPGVVGLDLGWRKKPDGSLRVGYLAFRETAKDAIATRTRELVLPASLVQRFARLREAESERTHAFEMERMWLS
RLLSTFVELPDWLKKESETLSQWRSPARLARLARIWSENRFERDELPYERLRGWAAGDALRYQENEEARQSAL
RAREWYYGNWAAACANAYGALAVENMNISRLIRHRDPDADEPAHEERARSRAVAAPGRLRQVFAHAFEGRGGI
VMLRPTKNTTITCPTCGDVRKFDAAEILAPTCANGHTIDQDERAARNLCEGVSGEEAAEAARAREVRESTPKE
SRWAKVKRMKREKEEGALARGVGSAG (SEQ ID NO: 73)
>3300009175|Ga0073936_10014029_2
[aquatic-freshwater-freshwater lake hypolimnion]
MNPASMAPKGMIVGLLMTYNIYLPLLFCKFEACRIYLGVLAIGQARYTSEKLEAKKMLDKGAKVTFTYDGNET
SGKILHTLAAGKKPAAYFDILTAADKALEADRCFDETRSCEDESYLVVTKRSKNTVAKIYWLSKDDLSGVQVV
VRQYGLLQPSNWQDDCFNHLYLQNRYWNCLVEIEQDNRNKYRALVGEDEDVAPIQDAIDGLKSRIADMAEQRT
QLKIEHCKKIGIHTEPLDNAIKAAKAEMKKLSNKAKEARAVAKERIRAAGPAFKLLEDERRQSVKEAYNNSQL
WWGNYNAITNSYNTARTRAMKEGADLRFHRFDGSGRFTCQIMGGMSTDDLLSGRNSVAQLRKVSNSEFTKIIK
SNPPALQLQLVGSRRDEREYGVLSITIYTAEDDQGKKTRRTLDFPIILHRPLPENATLKIISVNRKKIGTDYR
WAVTFTFSEETKESIVHTSKQTCGINLGWKQVAGGLRVATVSDGTSTRHVVLPQVIIDKLAYTESLQSRIDTA
TNENFIWLLGKMADPPEILKGDVTSLKRSKRPHPAKFAKFVIKWRNECSEFEPQALIEAEVMRKNVKRLSLEH
HHLRDKVLRRRIDFYRNEAKKIADKYSMIVMDKMDLRQMSALEKSDGTPNELADLARYHRKVAAISEFREWIG
KQAIKAGGAVEMIAIESTRTCNACDGVMAPSDGLMFRCKSCGTFVDQDENASANLLRAVT (SEQ ID NO:
74)
>3300015360|Ga0163144_10020017_5
[aquatic-freshwater-freshwater microbial mat]
MSVRVYKYGLRRPHEQGERVRAQMRAAHRYRNTLVEIERARRTAVRSAMSAYGNIGELEAAARSADVVVSDAV
RLAKAAKAEARSHSGVSSDQKAALLAARERKRDAVRLLRETRVLLRQDVVLSTEVDRVNELAAELRRNARKHC
GVYWGTYLLIEAADEAARKVPLYDGAEPSDPRFMRWAGEGRVGVSIAKGADIAVLDDTKDTRIRIEPGTMPKG
ADPASKRSAKRRHAVLAMRVGSGDQREPVFARWEMVMHRSLPAGARIKNAAVSLRLVGPREEWSVAITLDTTA
CAETATRGRGVVGVDLGWRMLNGDIRSAAWDGGDVSGFLALPAELIGQVEKVADLRSIRSKNFDASRAALVAA
MPADAPAWLRGATASLGQWKSIDRLTKLALRWRVARFDGDAAAYDALEAWRYNDHHLWCWESEQRTRTLRHRR
EIYRIFAAKLAREYETLAIENFDLRVFSVRAPVETDASIDTVTRAARVVVSPSELRLSLVNAFGPHRVVKVDA
ANTTRECSECHHINTWDAAAELSHTCAQCGARWDQDANAARVIRARGTAASPAPGAARNGDSANDSAAPIESR
WAKAKRMRAEKRSGEGGARKPVDAAAE (SEQ ID NO: 75)
>3300015360|Ga0163144_10020017_4
[aquatic-freshwater-freshwater microbial mat]
MRAAHRYRNTLVEIERARRTAVRSAMSAYGNIGELEAAARSADVVVSDAVRLAKAAKAEARSHSGVSSDQKAA
LLAARERKRDAVRLLRETRVLLRQDVVLSTEVDRVNELAAELRRNARKHCGVYWGTYLLIEAADEAARKVPLY
DGAEPSDPRFMRWAGEGRVGVSIAKGADIAVLDDTKDTRIRIEPGTMPKGADPASKRSAKRRHAVLAMRVGSG
DQREPVFARWEMVMHRSLPAGARIKNAAVSLRLVGPREEWSVAITLDTTACAETATRGRGVVGVDLGWRMLNG
DIRSAAWDGGDVSGFLALPAELIGQVEKVADLRSIRSKNFDASRAALVAAMPADAPAWLRGATASLGQWKSID
RLTKLALRWRVARFDGDAAAYDALEAWRYNDHHLWCWESEQRTRTLRHRREIYRIFAAKLAREYETLAIENFD
LRVFSVRAPVETDASIDTVTRAARVVVSPSELRLSLVNAFGPHRVVKVDAANTTRECSECHHINTWDAAAELS
HTCAQCGARWDQDANAARVIRARGTAASPAPGAARNGDSANDSAAPIESRWAKAKRMRAEKRSGEGGARKPVD
AAAE (SEQ ID NO: 76)
>3300015360|Ga0163144_10033243_8
[aquatic-freshwater-freshwater microbial mat]
MSIRVYKYGLRRPHEQSERVRAQMLAAHRYRNTLVEIERARRAAVRSAMSAYGNIGELEAAAHAADTVVLGVV
RLAKAAKAEARSHSGISSDQKAALSAAREHRRDAVRLLRETRVLLRQDVVLSTEVDRVSELACELRKSARKHC
GVYWGTYLLIEAADEAARKAPLYDGAEPSDPRFARWIGEGRVGVSIMKGADISVLDMEDTRIRIEPGTMPKGA
DPTSKRSAKRRHTVLAMRVGSDDQRGPIFARWEMVMHRPLPAGARIKNAAVSLRLVGPREEWSVAITLDTTAC
AETATSGRGVVGVDLGWRMLDGDIRSAAWDGGDLSGYLALPAELIGQVEKVADLRSIRSKSFDASRDALIAVM
PTNAPAWLRAATSSLRQWKSINRLTKLALRWRVARFDGDAAAYDALEAWRYNDHHLWCWESEQRTRTLRHRRE
IYRIFAAKLARKYETLAIENFDLRVFSVRAPVETDASIDTITRAVRVVVSPSELRRSLINAFGPHRVVKVDAA
NTTRECAECHHINTWDAAAELSHTCAQCSARWDQDANAARIIRARGAAASPQGRNSDSATTTESRWAKAKRMR
AEKRSGEGGDRKSVDTAAE (SEQ ID NO: 77)
>3300015360|Ga0163144_10033243_7
[aquatic-freshwater-freshwater microbial mat]
MSAYGNIGELEAAAHAADTVVLGVVRLAKAAKAEARSHSGISSDQKAALSAAREHRRDAVRLLRETRVLLRQD
VVLSTEVDRVSELACELRKSARKHCGVYWGTYLLIEAADEAARKAPLYDGAEPSDPRFARWIGEGRVGVSIMK
GADISVLDMEDTRIRIEPGTMPKGADPTSKRSAKRRHTVLAMRVGSDDQRGPIFARWEMVMHRPLPAGARIKN
AAVSLRLVGPREEWSVAITLDTTACAETATSGRGVVGVDLGWRMLDGDIRSAAWDGGDLSGYLALPAELIGQV
EKVADLRSIRSKSFDASRDALIAVMPTNAPAWLRAATSSLRQWKSINRLTKLALRWRVARFDGDAAAYDALEA
WRYNDHHLWCWESEQRTRTLRHRREIYRIFAAKLARKYETLAIENFDLRVFSVRAPVETDASIDTITRAVRVV
VSPSELRRSLINAFGPHRVVKVDAANTTRECAECHHINTWDAAAELSHTCAQCSARWDQDANAARIIRARGAA
ASPQGRNSDSATTTESRWAKAKRMRAEKRSGEGGDRKSVDTAAE (SEQ ID NO: 78)
>3300015360|Ga0163144_10062707_6
[aquatic-freshwater-freshwater microbial mat]
MSSRSKENRMFGHESKPTRNYVYGILAPTEGADLVDEQLRAAHQYRNNLVRLELDRREAVQQCLLAMRPAVAR
LTGEVADAVTAYDAAAAALKVRNARERNKRASADERQASKDAAALLKGLRGQLKAVRTEAFAADDVRAALDAI
ETVASERRREARGACGVYWGTYLTVEQAAGSFRSGAPPIFHRWTGEGRLAIQLQNGVEPAVLTLGQDKRLRIE
LTGECGRGKRPLAVAWLRVGSDGRAPVWAKFPMVYHRPIPVDAKIKWAFVHRRRCGTFWRWQLMLSVARDAWE
SPTTSGGSVGIDLGWRVVPEGLRVASWAGDDGRRGELILPADDLRRWSEPATRRAERDVRFGEFLPRVADWFA
ANAGRFGEEMRERVKTIRQWRSPARLAGLLRAWSAERVTGDEEIYGELVRWMREDSREWNSESGQRARASRWR
DDYYRCFVKRLASEYRVVHVEDMDLREIKRKPKAEEAESENQTARGNAFIASPGRLRELIREGFAETMSIDAA
WTTQRCHACGEIDGFDAAAELVRTCRHCGVAEDQDYRAAMNLLHGEQPDADEMAVVARGV (SEQ ID NO:
79)
>3300015360|Ga0163144_10062707_6
[aquatic-freshwater-freshwater microbial mat]
MFGHESKPTRNYVYGILAPTEGADLVDEQLRAAHQYRNNLVRLELDRREAVQQCLLAMRPAVARLTGEVADAV
TAYDAAAAALKVRNARERNKRASADERQASKDAAALLKGLRGQLKAVRTEAFAADDVRAALDAIETVASERRR
EARGACGVYWGTYLTVEQAAGSFRSGAPPIFHRWTGEGRLAIQLQNGVEPAVLTLGQDKRLRIELTGECGRGK
RPLAVAWLRVGSDGRAPVWAKFPMVYHRPIPVDAKIKWAFVHRRRCGTFWRWQLMLSVARDAWESPTTSGGSV
GIDLGWRVVPEGLRVASWAGDDGRRGELILPADDLRRWSEPATRRAERDVRFGEFLPRVADWFAANAGRFGEE
MRERVKTIRQWRSPARLAGLLRAWSAERVTGDEEIYGELVRWMREDSREWNSESGQRARASRWRDDYYRCFVK
RLASEYRVVHVEDMDLREIKRKPKAEEAESENQTARGNAFIASPGRLRELIREGFAETMSIDAAWTTQRCHAC
GEIDGFDAAAELVRTCRHCGVAEDQDYRAAMNLLHGEQPDADEMAVVARGV (SEQ ID NO: 80)
>3300020057|Ga0163151_10006104_16
[aquatic-freshwater-freshwater microbial mat]
MSVRVYKYGLRRPHEQGERVRAQMRAAHRYRNTLVEIERARRTAVRSAMSAYGNIGELEAAARSADVVVSDAV
RLAKAAKAEARSHSGVSSDQKAALLAARERKRDAVRLLRETRVLLRQDVVLSTEVDRVNELAAELRRNARKHC
GVYWGTYLLIEAADEAARKVPLYDGAEPSDPRFMRWAGEGRVGVSIAKGADIAVLDDTKDTRIRIEPGTMPKG
ADPASKRSAKRRHAVLAMRVGSGDQREPVFARWEMVMHRSLPAGARIKNAAVSLRLVGPREEWSVAITLDTTA
CAETATRGRGVVGVDLGWRMLNGDIRSAAWDGGDVSGFLALPAELIGQVEKVADLRSIRSKNFDASRAALVAA
MPADAPAWLRGATASLGQWKSIDRLTKLALRWRVARFDGDAAAYDALEAWRYNDHHLWCWESEQRTRTLRHRR
EIYRIFAAKLAREYETLAIENFDLRVFSVRAPVETDASIDTVTRAARVVVSPSELRLSLVNAFGPHRVVKVDA
ANTTRECSECHHINTWDAAAELSHTCAQCGARWDQDANAARVIRARGTAASPAPGAARNGDSANDSAAPIESR
WAKAKRMRAEKRSGEGGARKPVDAAAE (SEQ ID NO: 75)
>3300020186|Ga0163153_10017638_7
[aquatic-freshwater-freshwater microbial mat]
MTSVYRYGLLPPTLGADVVDDQMRAGHRYQNALVELERARRDAVAGVLSNNAIDEIDLEIKALDEELSARRAA
IQAERGATKRKRVPHTTATRDIARRRELRGTRRTLIAARRADPAVMAALAGIEERAKVLHKQFRADSGVYWCT
YLKVEQAMDAARKGAKFGPPSFRRWNGGGAVSMQLQRRGPERLLMTADNAIECDDPRLHLDLIPTPVPNRRGK
PLPRVRLRVGSDGARRPIWAEWPMIYHRPLPDGAVITWATVIRELVASSPRWALLLTIEHGGVAPTAARGAAV
AVDLGWRRAIVDGDITTRACGHTATDDSDESELHVHRDVFGALGKADNLRSIRDKRMNEMQAILVAWLRGCGS
EEHRERTRFVAQWRACARFAGLAIWWRDHRIEGDELIFVLLEAWRKRDKHLWLWEAHARRTARARRLDGYRVF
AADLARRYETLIVEKINLAKVAEKPKPESTREHNATASSQRTATAPSELRGALVNAFRGRGGTVVEVGAHPSA
TAMLGEWRERPVAEEKPGVARMSKFGRLRAERGGSWAQRSRPLEGGSASD (SEQ ID NO: 81)
>3300020195|Ga0163150_10003396_14
[aquatic-freshwater-freshwater microbial mat]
MTSVYRYGLLPPTLGADVVDDQMRAGHRYQNALVELERARRDAVAWVLSDGVIDEIDRGIEALSEELSAQRAG
IQAERGATKRKRVPHTAETRGLDDRRRELRGTRRTLIAARRADPAVMAALAGIEERAKVLSKLLSKSSGVHWG
TKGVVHQAMDAARKGAKFGPPSFRRWNGGGAVSMQLQRTGREKRPLTADDAIECDDTRLHLDLTPTPVPNRRG
KPRRGKPLPRVRLRVGSDGARRPIWAEWPMIYHRPLPDGAVITWATVIRELVASSPRWALLLTIEHGGVAPTA
ARGAAVAVDLGWRRAIVDGDITTRACGHTATDDSDESELHVHRDVFGALGKADNLRSIRDKRMNEMQAILVAW
LRGCGSEEHRERTRFVAQWRACARFAGLAIWWRDHRMEGDELIFVLLEAWRKRDKHLWLWEAHARRTARARRL
DGYRVFAADLARRYETLIVEKINLAKVAEKPKPESTREHNATASWQRTATAPSELRGALVNAFRGRGGTVVEV
GAHPSATAMLGEWRERPVAEEKPGVARMSKFGRLRAERGGSWAQRSRPPEPLEGGSASD (SEQ ID NO:
82)
>3300020203|Ga0163148_10001247_2
[aquatic-freshwater-freshwater microbial mat]
MFGHESKPTRNYVYGILAPTEGADLVDEQLRAAHQYRNNLVRLELDRREAVQQCLLAMRPAVARLTGEVADAV
TAYDAAAAALKVRNARERNKRASADERQASKDAADLLKGLRGQLKAVRTEAFAADDVRAALDAIETVFRERRR
EARGASDVYWGTYLTVEQAAWSFRSGAPPIFHRWTGEGRLAIQLQNGVEPAVLTLGQDKRLRIELTGEYGRGK
RGKRPLAVAWFRVGSDGHTPVWAKFPMVYHRPIPVDAKIKWAFVHRRRCGTFWRWQLMLSVARDAWESPITSG
GSVGIDLGWRVVPEGLRVASWAGDDGRRGELILPADDLRRWSEPATRRAERDVRFGEFLPRVADWFAANSGRF
SEAMRERVKSIRQWKSPARLAGLLRAWGDERVVGDEEIHAELVTWMREDSREWNSEAGQRARASRWRDDYYRC
FVKRLAIEYRVVHVEDMDLREIKRKPKAEEAESENQTARGNAFIASPGRLRELIREGFAETMSIDAAWTTQRC
HACGEIDGFDAAAELVRTCRHCGVTEDQDYRAAMNLLAGEQPDADEMAGVARGV (SEQ ID NO: 83)
>3300020203|Ga0163148_10001247_2
[aquatic-freshwater-freshwater microbial mat]
MSSRSKENRMFGHESKPTRNYVYGILAPTEGADLVDEQLRAAHQYRNNLVRLELDRREAVQQCLLAMRPAVAR
LTGEVADAVTAYDAAAAALKVRNARERNKRASADERQASKDAADLLKGLRGQLKAVRTEAFAADDVRAALDAI
ETVFRERRREARGASDVYWGTYLTVEQAAWSFRSGAPPIFHRWTGEGRLAIQLQNGVEPAVLTLGQDKRLRIE
LTGEYGRGKRGKRPLAVAWFRVGSDGHTPVWAKFPMVYHRPIPVDAKIKWAFVHRRRCGTFWRWQLMLSVARD
AWESPITSGGSVGIDLGWRVVPEGLRVASWAGDDGRRGELILPADDLRRWSEPATRRAERDVRFGEFLPRVAD
WFAANSGRFSEAMRERVKSIRQWKSPARLAGLLRAWGDERVVGDEEIHAELVTWMREDSREWNSEAGQRARAS
RWRDDYYRCFVKRLAIEYRVVHVEDMDLREIKRKPKAEEAESENQTARGNAFIASPGRLRELIREGFAETMSI
DAAWTTQRCHACGEIDGFDAAAELVRTCRHCGVTEDQDYRAAMNLLAGEQPDADEMAGVARGV (SEQ ID
NO: 84)
>3300020213|Ga0163152_10009495_14
[aquatic-freshwater-freshwater microbial mat]
MSSRSKENRMFGHESKPTRNYVYGILAPTEGADLVDEQLRAAHQYRNNLVRLELDRREAVQQCLLAMRPAVAR
LTGEVADAVTAYDAAAAALKVRNARERNKRASADERQASKDAAALLKGLRGQLKTVRTEAFAADDVRAALDAI
ETVASERRREARGACGVYWGTYLTVEQAAGSFRSGAPPIFHRWTGEGRLAIQLQNGVEPAVLTLGQDKRLRIE
LTGECGRGKRPLAVAWLRVGSDGRAPVWAKFPMVYHRPIPVDAKIKWAFVHRRRCGTFWRWQLMLSVARDAWE
SPTTSGGSVGIDLGWRVVPEGLRVASWAGDDGRRGELILPADDLRRWSEPATRRAERDVRFGEFLPRVADWFA
ANAGRFGEEMRERVKTIRQWRSPARLAGLLRAWSAERVTGDEEIYGELVRWMREDSREWNSESGQRARASRWR
DDYYRCFVKRLASEYRVVHVEDMDLREIKRKPKAEEAESENQTARGNAFIASPGRLRELIREGFAETMSIDAA
WTTQRCHACGEIDGFDAAAELVRTCRHCGVTEDQDYRAAMNLLHGEQPDADEMAGVARGV (SEQ ID NO:
85)
>3300020213|Ga0163152_10009495_14
[aquatic-freshwater-freshwater microbial mat]
MFGHESKPTRNYVYGILAPTEGADLVDEQLRAAHQYRNNLVRLELDRREAVQQCLLAMRPAVARLTGEVADAV
TAYDAAAAALKVRNARERNKRASADERQASKDAAALLKGLRGQLKTVRTEAFAADDVRAALDAIETVASERRR
EARGACGVYWGTYLTVEQAAGSFRSGAPPIFHRWTGEGRLAIQLQNGVEPAVLTLGQDKRLRIELTGECGRGK
RPLAVAWLRVGSDGRAPVWAKFPMVYHRPIPVDAKIKWAFVHRRRCGTFWRWQLMLSVARDAWESPTTSGGSV
GIDLGWRVVPEGLRVASWAGDDGRRGELILPADDLRRWSEPATRRAERDVRFGEFLPRVADWFAANAGRFGEE
MRERVKTIRQWRSPARLAGLLRAWSAERVTGDEEIYGELVRWMREDSREWNSESGQRARASRWRDDYYRCFVK
RLASEYRVVHVEDMDLREIKRKPKAEEAESENQTARGNAFIASPGRLRELIREGFAETMSIDAAWTTQRCHAC
GEIDGFDAAAELVRTCRHCGVTEDQDYRAAMNLLHGEQPDADEMAGVARGV (SEQ ID NO: 86)
>3300020219}Ga0163146_10006198_18
[aquatic-freshwater-freshwater microbial mat]
MSVRVYKYGLRRPHEQGERVRAQMRAAHRYRNTLVEIERARRTAVRSAMSAYGNIGELEAAARSADVVVSDAV
RLAKAAKAEARSHSGVSSDQKAALLAARERKRDAVRLLRETRVLLRQDVVLSTEVDRVNELAAELRRNARKHC
GVYWGTYLLIEAADEAARKVPLYDGAEPSDPRFMRWAGEGRVGVSIAKGADIAVLDDTKDTRIRIEPGTMPKG
ADPASKRSAKRRHAVLAMRVGSGDQREPVFARWEMVMHRSLPAGARIKNAAVSLRLVGPREEWSVAITLDTTA
CAETATRGRGVVGVDLGWRMLNGDIRSAAWDGGDVSGFLALPAELIGQVEKVADLRSIRSKNFDASRAALVAA
MPADAPAWLRGATASLGQWKSIDRLTKLALRWRVARFDGDAAAYDALEAWRYNDHHLWCWESEQRTRTLRHRR
EIYRIFAAKLAREYETLAIENFDLRVFSVRAPVETDASIDTVTRAARVVVSPSELRLSLVNAFGPHRVVKVDA
ANTTRECSECHHINTWDAAAELSHTCAQCGARWDQDANAARVIRARGTAASPAPGAARNGDSANDSAAPIESR
WAKAKRMRAEKRSGEGGARKPVDAAAE (SEQ ID NO: 75)
>3300020596|Ga0163149_10010333_13
[aquatic-freshwater-freshwater microbial mat]
MSVRVYRYGLRRPHEQGERVRAQMRAAHRYRNTLVEIERARRTAVRSAMSAYGNIGELEAAARSADVVVSDAV
RLAKAAKAEARSHSGVSSDQKAALSAARERKRDAVRLLRETRVLLRQDVVLSTEVDRVNELAAELRRNARKHC
GVYWGTYLLIEAADEAARKVPLYDGAEPSDPRFMRWAGEGRVGVSIAKGADIAVLDDTKDTRIRIEPGTMPKG
ADPASKRSAKRRHAVLAMRVGSGDQREPVFARWEMVMHRSLPAGARIKNAAVSLRLVGPREEWSVAITLDTTA
CAETATRGRGVVGVDLGWRMLNGDIRSAAWDGGDVSGFLALPAELIGQVEKVADLRSIRSKNFDASRAALVAA
MPADAPAWLRGATASLGQWKSIDRLTKLALRWRVARFDGDAAAYDALEAWRYNDHHLWCWESEQRTRTLRHRR
EIYRIFAAKLAREYETLAIENFDLRVFSVRAPVETDASIDTVTRAARVVVSPSELRLSLVNAFGPHRVVKVDA
ANTTRECSECHHINTWDAAAELSHTCAQCGARWDQDANAARVIRARGTAASPAPGAARNGDSANDSAAPIESR
WAKAKRMRAEKRSGEGGARKPVDAAAE (SEQ ID NO: 87)
>3300020596|Ga0163149_10010333_12
[aquatic-freshwater-freshwater microbial mat]
MRAAHRYRNTLVEIERARRTAVRSAMSAYGNIGELEAAARSADVVVSDAVRLAKAAKAEARSHSGVSSDQKAA
LSAARERKRDAVRLLRETRVLLRQDVVLSTEVDRVNELAAELRRNARKHCGVYWGTYLLIEAADEAARKVPLY
DGAEPSDPRFMRWAGEGRVGVSIAKGADIAVLDDTKDTRIRIEPGTMPKGADPASKRSAKRRHAVLAMRVGSG
DQREPVFARWEMVMHRSLPAGARIKNAAVSLRLVGPREEWSVAITLDTTACAETATRGRGVVGVDLGWRMLNG
DIRSAAWDGGDVSGFLALPAELIGQVEKVADLRSIRSKNFDASRAALVAAMPADAPAWLRGATASLGQWKSID
RLTKLALRWRVARFDGDAAAYDALEAWRYNDHHLWCWESEQRTRTLRHRREIYRIFAAKLAREYETLAIENFD
LRVFSVRAPVETDASIDTVTRAARVVVSPSELRLSLVNAFGPHRVVKVDAANTTRECSECHHINTWDAAAELS
HTCAQCGARWDQDANAARVIRARGTAASPAPGAARNGDSANDSAAPIESRWAKAKRMRAEKRSGEGGARKPVD
AAAE (SEQ ID NO: 88)
>3300004174|Ga0066406_1000030_21
[aquatic-freshwater-freshwater sediment]
MIRVYKYGIKPPFDFGEDCVDELRRMNNYWNRLVEIDREREVAFRNLCRSWSPEYATAMDRIDALKQPIDAIY
EEIRATRVKNRNKELPDEIKVRKDRLLGERKVLWETCKAIQKKLPKDLQEPLIQKYKTDCKLARQQSGLYWGN
YNAVSESFETAKSRTIKEGGRLHFRLFDGAGRFVNQIQGGMTAVDLFTGAKSQAKCSASVIRKSRGGTPHHSF
TFTAFTGRDVDGKRFRRELTADLAYHRPIPAEGTIKSIEIVRDIIDGHEKWHVCFTVSLPDIEIEHPKRNIAG
VNMGWRQIGSALRIAVIVDDKNQKREYFLPATVAHKFEHAESIQAKADEAENEMLVWLREIYQAANQAPQEWK
EAVQGVLRNRPARDAYAKLLSEWEGAQDLINGFDEYKAWHKENKKLHRYYAGTRRRAIAWREEIYRSIAKEIA
ENYAVIAITDTPLSQMSRTKSSGGLSIDNALPPAARRNRVIAGIYTLKEWIDKQAAKTGAVVEKITDKVTQTC
HKCSAIADKRVGSERYITCTNCESELEVDENAAINSRKLASGEVTPKKELRKAAKYQRVREAMNAKNDSARKM
ADNSSDGVA (SEQ ID NO: 89)
>3300004200|Ga0066422_1000628_7
[aquatic-freshwater-freshwater sediment]
MIRVYKYGIKPPFDFGEDCVDELRRMNNYWNRLVEIDREREVAFRNLCRSWSPEYATAMDRIDALKQPIDAIY
EEIRATRVKNRNKELPDEIKVRKDRLLGERKVLWETCKAIQKKLPKDLQEPLIQKYKTDCKLARQQSGLYWGN
YNAVSESFETAKSRTIKEGGRLHFRLFDGAGRFVNQIQGGMTAVDLFTGAKSQAKCSASVIRKSRGGTPHHSF
TFTAFTGRDVDGKRFRRELTADLAYHRPIPAEGTIKSIEIVRDIIDGHEKWHVCFTVSLPDIEIEHPKRNIAG
VNMGWRQIGSALRIAVIVDDKNQKREYFLPATVAHKFEHAESIQAKADEAENEMLVWLREIYQAANQAPQEWK
EAVQGVLRNRPARDAYAKLLSEWEGAQDLINGFDEYKAWHKENKKLHRYYAGTRRRAIAWREEIYRSIAKEIA
ENYAVIAITDTPLSQMSRTKSSGGLSIDNALPPAARRNRVIAGIYTLKEWIDKQAAKTGAVVEKITDKVTQTC
HKCSAIADKRVGSERYITCTNCESELEVDENAAINSRKLASGEVTPKKELRKAAKYQRVREAMNAKNDSARKM
ADNSSDGVA (SEQ ID NO: 89)
>3300004205|Ga0066415_1000057_23
[aquatic-freshwater-freshwater sediment]
MIRVYKYGIKPPFDFGEDCVDELRRMNNYWNRLVEIDREREVAFRNLCRSWSPEYATAMDRIDALKQPIDAIY
EEIRATRVKNRNKELPDEIKVRKDRLLGERKVLWETCKAIQKKLPKDLQEPLIQKYKTDCKLARQQSGLYWGN
YNAVSESFETAKSRTIKEGGRLHFRLFDGAGRFVNQIQGGMTAVDLFTGAKSQAKCSASVIRKSRGGTPHHSF
TFTAFTGRDVDGKRFRRELTADLAYHRPIPAEGTIKSIEIVRDIIDGHEKWHVCFTVSLPDIEIEHPKRNIAG
VNMGWRQIGSALRIAVIVDDKNQKREYFLPATVAHKFEHAESIQAKADEAENEMLVWLREIYQAANQAPQEWK
EAVQGVLRNRPARDAYAKLLSEWEGAQDLINGFDEYKAWHKENKKLHRYYAGTRRRAIAWREEIYRSIAKEIA
ENYAVIAITDTPLSQMSRTKSSGGLSIDNALPPAARRNRVIAGIYTLKEWIDKQAAKTGAVVEKITDKVTQTC
HKCSAIADKRVGSERYITCTNCESELEVDENAAINSRKLASGEVTPKKELRKAAKYQRVREAMNAKNDSARKM
ADNSSDGVA (SEQ ID NO: 89)
>3300004565|Ga0066503_104695_4
[aquatic-freshwater-freshwater sediment]
MIRVYKYGIKPPFDFGEDCVDELRRMNNYWNRLVEIDREREVAFRNLCRSWSPEYATAMDRIDALKQPIDAIY
EEIRATRVKNRNKELPDEIKVRKDRLLGERKVLWETCKAIQKKLPKDLQEPLIQKYKTDCKLARQQSGLYWGN
YNAVSESFETAKSRTIKEGGRLHFRLFDGAGRFVNQIQGGMTAVDLFTGAKSQAKCSASVIRKSRGGTPHHSF
TFTAFTGRDVDGKRFRRELTADLAYHRPIPAEGTIKSIEIVRDIIDGHEKWHVCFTVSLPDIEIEHPKRNIAG
VNMGWRQIGSALRIAVIVDDKNQKREYFLPATVAHKFEHAESIQAKADEAENEMLVWLREIYQAANQAPQEWK
EAVQGVLRNRPARDAYAKLLSEWEGAQDLINGFDEYKAWHKENKKLHRYYAGTRRRAIAWREEIYRSIAKEIA
ENYAVIAITDTPLSQMSRTKSSGGLSIDNALPPAARRNRVIAGIYTLKEWIDKQAAKTGAVVEKITDKVTQTC
HKCSAIADKRVGSERYITCTNCESELEVDENAAINSRKLASGEVTPKKELRKAAKYQRVREAMNAKNDSARKM
ADNSSDGVA (SEQ ID NO: 89)
>3300009686|Ga0123338_10029047_2
[aquatic-freshwater-glacier valley]
MNNSTPTNPSERSEPLAALERVRVVQFGACAPTAGWEAGFLQHRLRTRFWNAICEIERNHRDTVQATVGPLKE
AGMPSKDAYASEDVQALELARKGKRLVARQEAAQGGLFWTGYLEVERAMDTARRGLEPPRFKRFEAHEGKLNF
LFTNGLASSELCGDDLRVQFEPLELPEGCSARTRKANPYHVKLRVCSQDKKPVWLEFVAYLHRPIPEGSVRDV
ALIWRREGAKQRYSLSVTVREGGVIHAPAPFERAAINIGWKRLTHGLRVAYWRGTDGKHGEIVLSNAWLERYH
HALGIESVRAKPLNSIKEQMLAYFRTTPDVPEEMATRVTHLAQWRSAARFAVLYKFWVGQRWHGDDAGFNALE
AWHKRDVHLWQYGEGTSARLMRSRREQYRTFAAKMLERYGEIVMDKLDLRIFAELEARGDDLAPIARAQRVQA
APSTLRLALQNAYGREGRVVSWVGARTSSTCHVCRAPVVLGRDLIHTCQGCQSHWDVDDNACSNLLREPEAGI
KIPKASRSPRARKNLALGTAVGAD (SEQ ID NO: 90)
>3300001242|C687J13896_1000006_134
[aquatic-freshwater-groundwater]
MKRSKSDKSARVYKFGSPLKTAVESEVAMEQLRLQNRFWNALVEADKVFTEKYWAIRDGADARLPVLRKQIED
IKVRTEEIRTEIKKGRQDGIKGTPSDLKAEIVELKAQKKPLIAEKKEIWAFVKDTVKPQLHELDGERYDKNVA
IRQEYAQNGLYWGNYLAVMDSFETARMAIMKTQVEDGQKRPELQFHRFERVGRWTCQIQGGMNITQAFLGSNN
YFQIDRLPADAWTHPSRGERGRLKRTKARIRIGSGEKKTVPIWLEIPIVMHRPIPESAEIKSVSIHVSKLADK
FVWSLTVTVREDCSVPLERTGHCVAINIGWRAKGLATRIAYMLDSRGVEEEILLGSEYTVSNEKAASLQGIRK
KNFNETVAWFNEWKKANADIVPPWLSERTKMMMSWKSEAQLASVAIQWSGRGFRREGDPPEFRFHGDEEAFNK
IEAWRKQDKHLWQWHANLSDRIRGRRLCEYRKIALKLSKEYDVVIQEDFDLRKTKGKKKAEEGADNDDHIRRM
SDLASVSTFRTETIRAMRSAGKEHVKLDSKNITKTCPFCGGTIKPGRKTNIMVQCSKCGKVYDQDWAASKNLL
TAYLDSSGDVPPETP (SEQ ID NO: 91)
>3300005236|Ga0066636_10020712_3
[aquatic-freshwater-groundwater]
MTRVFEYGLPFDPFDGAELVDEQILLAHRYYNKLIELEHTRRSSILAVQRADPKVGPLLAAYDAANAEVEDLL
ARKREAKSRDRRVAAPELSEIEAAKEARRHLSVQLRKVKKVATDRLKPEYDLAEQATRDAKKAARAASGVFWG
TYSLIEQAADAAAKAKPVLRPGTHPRPWDQQPSFRRWTGEGMVAVQININRPLNDVTVFGDDLRLRITPVDPA
AWSDATSRGDRKCLARTNVTMRVGRNTGETATWPMVMHRPLPAGSRVTWAKVLRRRLDDRPHWFKYVLQLTVE
TADAPRHPGLVSLPPAIVAINCGWRALPNGSLRVVTWVGSDGAEGVLDLGCREYRDRIERAESIRSVRDQLRN
ELTSKLVGIGIDVTRWRSFDRFHRLFRELTAEGCERNEAVELLEAWHHRDRHLRQYQDGARGGALRFRREQYR
LLAVELARRYPVVCVESWDLRPVVTDEDRLPGPAAARVEGASSTARLALASAATREGCVVLTQIAAHVRLQTQ
TCHVCGYGAKKGEEWDAAAELVHTCEGCGETWNQDVNFCRNILAASRAAVTEIPELLVPKIMKRSARFAARHK
KVAT (SEQ ID NO: 92)
>3300014208|Ga0172379_10007070_15
[aquatic-freshwater-groundwater]
MRVYRYGLLRPTDEQELGLVREQMRLANKYRNWLVWLERGYRMALSELVDAHPSVAPFLSETEASEVKVDAKE
VKIRRKRKATRSRSESTEDRQEVATERVSLTERRNALSAARWAALKGPLKAEAKRMNDLWEEMQKETRRQSVC
GVFWGTSQIQDLAMKESRKALLWYRGKLALPDFVRWSDNQSVGVQVQDNIPPEDLFRQGSLVRIAPVSPQAWS
EAVPRGDRKRLQRTVLSLRVQSDAKRQPVWAHWPMIMHRAIPAGCVVTRVAVRCRMIGPREEWYATITVDDSK
AETAQPCGNGTVAMDLGWRAMKGGGIRVARWRDSDGGSGEFQLDEHIVSSLRKAEGLHATRDDNFNEARAKLQ
KWLAGAPDVPGWLRLDTETLGSWRSLERLQALAGKWKKNRFAGDEEGYAALEQWHYHDYHLWQWESDQRAKSL
RHRRELYRIFAAKMACRYSTLVLEDFEIPGVAKKPTVEEDSEYNKNAAHNRQLASPHEFRECMKAAFVARDGM
VQLLPCADTTRHCSVCGSLELFDQAKHLWHTCLACEGEGRATTWDQDDNAAQNLLDLWQNGADPVKTVSKALA
LANKREPAWIKAKRLARAKREADASGAVVQQPTEALEAE (SEQ ID NO: 93)
>3300014208|Ga0172379_10014650_2
[aquatic-freshwater-groundwater]
MGLVSGIKVYRYGLLAPTENAHLVGEQMWLAHRYQNTLIEIERARRAALRAVYVAHGDVAAMTAVCQAATAEV
ARLYRDAKAARSQSRKRQIPSEIGDALKVAKEASREAQARLRAARLAIKTDPSVVASREQIEERAAWLRRNAR
AYCGVYWGTYLGIESAVSQTAKMPLYDGSEPNDPRFSRWEHEGTVGVQLQGGLAGAGAMRCDDTRLRIEVGTA
PKGVDPTSRRSATRRYMVLAMRVDSDGRDPVWARWPMKMHRPLPDDAVIKWAHVHRRRRGPHDEWSVTLTIET
SAARPAAPTGAVGIDLGWRSLDTDGIRVAAWHGSDGRSGTLVLSEWDLSRLEKANDLRSIRDKKFDAARAALS
TWLENACVPAWFHEATAHLVQWKSIERLMGLVRRWKGSRFGGDDAAYEALEAWRYNDHHLWAWEAHQRVRALR
NRREIYRVFAARMAREYHTVVLEDWNISKIAKRPAVDEETVADGNKNSRTARQSVAVSELRLALTHAFGARVE
KVPCAFTTRDCHACGSVESWDQAAELVHTCSSCGVVWDQDANAAQNLLARFAARGGGDLDNAGTARGNETMNA
SETLKESRWARAKRVKAERIASDQVARE (SEQ ID NO: 94)
>3300014613|Ga0180008_1000021_8
[aquatic-freshwater-groundwater]
MIPDGKRKGEKRMILIYEYGIPFDPMEGHDFVEDQILMAHRYYNKLIEIERAKRARIRAIQQAHPILGPLVTE
SDETHELFNDIIDRQKKAKSKDNRYPEVDPEEWEAAKEISAEVRLRLTAAKAAVKAELTPAYEAASQEAKDRK
RLARANSKVYWGTYLITEAAAEAAVNAKPKSRPGKVPPPWHMCPAFRRWNGEGSLAVQIQKPKALTEVTVFGH
DNQFRITPVDPYAWDKSTPRGLRCRLGRTTFTMRVGMKRGETASFRMVMHRPLPPGSRITWAKIIRRRVDDRL
YRFRYFLQLTVETTLCVRHPGLDNADPVSIPVVAINCGWRALADGSLRVATWLGSDNRTGTLELGREEFRDRI
ERAESIRSRRDIDLDELKKAIEGFGEIFKSMEVECVEKWKSFSRFHGLYCDVLTEYAENPTEEKKELLELLTS
WHHRDRYLMQYENGCRGGALRFRREKYRLFALELAKAYPVVCIESWDLRRIVEDEHRLKEPSAARVEGASSIA
RQITRNTSLREGCVVLKQGDKEVELATQRCHLCGYGAKKRERWDAAKELVHVCGGCGAEWNQDVNFCENILTT
SRGDLVGAPQLLEPKIVIQLGRFQKRAAAKREREAAQADEQEE (SEQ ID NO: 95)
>3300014613|Ga0180008_1000021_9
[aquatic-freshwater-groundwater]
MIPDETTTSLFAGKLSDPGRNSHRHCSPGNLVIPDGKRKGEKRMILIYEYGIPFDPMEGHDFVEDQILMAHRY
YNKLIEIERAKRARIRAIQQAHPILGPLVTESDETHELFNDIIDRQKKAKSKDNRYPEVDPEEWEAAKEISAE
VRLRLTAAKAAVKAELTPAYEAASQEAKDRKRLARANSKVYWGTYLITEAAAEAAVNAKPKSRPGKVPPPWHM
CPAFRRWNGEGSLAVQIQKPKALTEVTVFGHDNQFRITPVDPYAWDKSTPRGLRCRLGRTTFTMRVGMKRGET
ASFRMVMHRPLPPGSRITWAKIIRRRVDDRLYRFRYFLQLTVETTLCVRHPGLDNADPVSIPVVAINCGWRAL
ADGSLRVATWLGSDNRTGTLELGREEFRDRIERAESIRSRRDIDLDELKKAIEGFGEIFKSMEVECVEKWKSF
SRFHGLYCDVLTEYAENPTEEKKELLELLTSWHHRDRYLMQYENGCRGGALRFRREKYRLFALELAKAYPVVC
IESWDLRRIVEDEHRLKEPSAARVEGASSIARQITRNTSLREGCVVLKQGDKEVELATQRCHLCGYGAKKRER
WDAAKELVHVCGGCGAEWNQDVNFCENILTTSRGDLVGAPQLLEPKIVIQLGRFQKRAAAKREREAAQADEQE
E (SEQ ID NO: 96)
>3300014656|Ga0180007_10000195_44
[aquatic-freshwater-groundwater]
MIPDGKRKGEKRMILIYEYGIPFDPMEGHDFVEDQILMAHRYYNKLIEIERAKRARIRAIQQAHPILGPLVTE
SDETHELFNDIIDRQKKAKSKDNRYPEVDPEEWEAAKEISAEVRLRLTAAKAAVKAELTPAYEAASQEAKDRK
RLARANSKVYWGTYLITEAAAEAAVNAKPKSRPGKVPPPWHMCPAFRRWNGEGSLAVQIQKPKALTEVTVFGH
DNQFRITPVDPYAWDKSTPRGLRCRLGRTTFTMRVGMKRGETASFRMVMHRPLPPGSRITWAKIIRRRVDDRL
YRFRYFLQLTVETTLCVRHPGLDNADPVSIPVVAINCGWRALADGSLRVATWLGSDNRTGTLELGREEFRDRI
ERAESIRSRRDIDLDELKKAIEGFGEIFKSMEVECVEKWKSFSRFHGLYCDVLTEYAENPTEEKKELLELLTS
WHHRDRYLMQYENGCRGGALRFRREKYRLFALELAKAYPVVCIESWDLRRIVEDEHRLKEPSAARVEGASSIA
RQITRNTSLREGCVVLKQGDKEVELATQRCHLCGYGAKKRERWDAAKELVHVCGGCGAEWNQDVNFCENILTT
SRGDLVGAPQLLEPKIVIQLGRFQKRAAAKREREAAQADEQEE (SEQ ID NO: 95)
>3300014656|Ga0180007_10000195_48
[aquatic-freshwater-groundwater]
MIPDETTTSLFAGKLSDPGRNSHRHCSPGNLVIPDGKRKGEKRMILIYEYGIPFDPMEGHDFVEDQILMAHRY
YNKLIEIERAKRARIRAIQQAHPILGPLVTESDETHELFNDIIDRQKKAKSKDNRYPEVDPEEWEAAKEISAE
VRLRLTAAKAAVKAELTPAYEAASQEAKDRKRLARANSKVYWGTYLITEAAAEAAVNAKPKSRPGKVPPPWHM
CPAFRRWNGEGSLAVQIQKPKALTEVTVFGHDNQFRITPVDPYAWDKSTPRGLRCRLGRTTFTMRVGMKRGET
ASFRMVMHRPLPPGSRITWAKIIRRRVDDRLYRFRYFLQLTVETTLCVRHPGLDNADPVSIPVVAINCGWRAL
ADGSLRVATWLGSDNRTGTLELGREEFRDRIERAESIRSRRDIDLDELKKAIEGFGEIFKSMEVECVEKWKSF
SRFHGLYCDVLTEYAENPTEEKKELLELLTSWHHRDRYLMQYENGCRGGALRFRREKYRLFALELAKAYPVVC
IESWDLRRIVEDEHRLKEPSAARVEGASSIARQITRNTSLREGCVVLKQGDKEVELATQRCHLCGYGAKKRER
WDAAKELVHVCGGCGAEWNQDVNFCENILTTSRGDLVGAPQLLEPKIVIQLGRFQKRAAAKREREAAQADEQE
E (SEQ ID NO: 96)
>3300014656|Ga0180007_10004731_7
[aquatic-freshwater-groundwater]
MFGHESQPSRIYAYGAKAPVVNGERVGEQIWLGHRYRNTLAEIELRRREQTDKMVVTLSPELPGVEAKLLEAD
QAIESAAAEIKLANKQARRQKATPEQKTKLAALRKERAALRKKRKALRDVVFSDSGTHDALTGIDQRAAAEQR
EARAESGLYWGTYLTVEQGCQSFRKGRPPRFLRWTGEGRIAVQVQGGLAPEDAFGGEDKRLIVEPLPEDAWSK
RSRGLKRTKAWLRIGSDDDRQPVWAVVPFVMHRSLPADCRIKWVYLHRRRVGTKDQWMLSFVIARQVWPQTDV
AGSGEIGIDLGWRLLDHGLRVAAWAGSDGESGELVLPIQDVGRWQKAQDLRGIRDTRLDAVIARFGEWLSGND
APDWLTERTRTLRQWRSAARLASVVLAWRDQRFAGDESIYADLEAWRKKDKHLYEWEANQRRKAVAWLKDLYR
NFAAAMARRYRVAVLEAVNWRDMGRRAGVGESDKAGAARRQRVIASPGRLAECIRERFADCVSAPAEYTTQRC
HACGEIDGFDARVEIVHTCGKCGKTWDQDYNAARNLLAFASGPVAKKTR (SEQ ID NO: 97)
>3300014656|Ga0180007_10004731_5
[aquatic-freshwater-groundwater]
MMFGHESQPSRIYAYGAKAPVVNGERVGEQIWLGHRYRNTLAEIELRRREQTDKMVVTLSPELPGVEAKLLEA
DQAIESAAAEIKLANKQARRQKATPEQKTKLAALRKERAALRKKRKALRDVVFSDSGTHDALTGIDQRAAAEQ
REARAESGLYWGTYLTVEQGCQSFRKGRPPRFLRWTGEGRIAVQVQGGLAPEDAFGGEDKRLIVEPLPEDAWS
KRSRGLKRTKAWLRIGSDDDRQPVWAVVPFVMHRSLPADCRIKWVYLHRRRVGTKDQWMLSFVIARQVWPQTD
VAGSGEIGIDLGWRLLDHGLRVAAWAGSDGESGELVLPIQDVGRWQKAQDLRGIRDTRLDAVIARFGEWLSGN
DAPDWLTERTRTLRQWRSAARLASVVLAWRDQRFAGDESIYADLEAWRKKDKHLYEWEANQRRKAVAWLKDLY
RNFAAAMARRYRVAVLEAVNWRDMGRRAGVGESDKAGAARRQRVIASPGRLAECIRERFADCVSAPAEYTTQR
CHACGEIDGFDARVEIVHTCGKCGKTWDQDYNAARNLLAFASGPVAKKTR (SEQ ID NO: 98)
>3300015370|Ga0180009_10002661_7
[aquatic-freshwater-groundwater]
MQAKVYVYGLRPPTHEAERVAEQLHLAHRYRNDLVAIERKRRERVAALLSASGLSAHEERLEAAEQVLEAALS
SLRAVRQAACKRAETSEQREAVKAARADVKAFREQLKEERKQLRPTLSAETETINDGAADERRAARAVCGVYW
GTYLLIEQADEQARKSPTPPQFQRWTGEGAVGVQLQGGLDTDTVFGADTRLQIDPVPPTAWDRRRSPERRTRV
RLRVGSDGRAPIWAEWPVTLHRPLPTGEIVWAKVLRQRVEAKSEWGLHLTIRVEDPTPTARSGAVGVDLGWRL
REDGLRSGYWVGSDGEHGEILVDQRTLDRLQKVKSLCSIRDRNLDELRPWLAEWLRARRAGLPEWLRERTQYL
HTWKAPRKFNALSVAWRAQRFPGDGEAVERLEAWRKQDKHLWTWETHQRERTLRCRREGYRLLAATLAERYGV
LVLEDLDLRVFQQRRPAEAEQGECQPARSQQPVAATSILRSCLINAFEAVGGRVVKLDPAGTTKECWLCGGTA
WSVQAEESVDRTCRECAALVDQDENAGRVLLARFERSGGIAGSADPDTSKSGQLRVSGGRWQRRKERCSKSGT
QDCTA (SEQ ID NO: 99)
>3300009760|Ga0116131_1003961_2
[aquatic-freshwater-peatland]
MKRKTSLVPTKVYRYGLLSPTSNGRLVDETIYRGHQFYNRLIEIERARRAEYRAERTRRFPELATVESLVEDL
TKQIETMRTAIVATKIATQSRAVATDSAAELKRLRDERKIAHDRLVEMRAACKSDLDFSAWVKIANEKAYGLV
KAARNSCGVAWGTYNLIAASAQQASATSTMDPEFRRYDGEGRIGVQIIGGMSVADLATDTQLQIAMPEFHDGM
TRGEWRRASRTVVKMRVGSDENRRPIWAEFPAVIHRPLPEDARIMSAVITRRRLGVFRRWEYSLCISCESNKF
DRTLPGLKQEGTATINFGWRQFSDGFRVATVNNDVTGIEEIRLPKTITDRFSKCEDLRSIIDMRFNIVRAELQ
EWLASHKADCPEWLTTSLEFLHLWKQPERLDRVVGNWAGLRFAADADIYSILADWRTKYRHLQDWQMMNRRQG
LNMRKEFYRLVASRLAQHNAKLVVEAFDVRQVAVLPRPEEVASGGTAARHNRFLVAVGNLRSSILLAAQKYHC
AVDVVKATNNTRRCNVCGKLLDWDPAKTVNRECPECSTWDQDVNATDNAVDRVASGEVVTMIAPAELAENGSI
RPATKRSWGAARNELDKMPSLL (SEQ ID NO: 100)
>3300018019|Ga0187874_10017489_1
[aquatic-freshwater-peatland]
MSAILVYKFGLLRPVDNATMVHQQVRAAHDYRNDLTMIERGRRAAIRSVLESEPDVAAALTGARAARALLDAA
LAVVASARASARTRAAGAPATGDVKSVRAVLHAAEGTFRQALQAVRTRSHVVSETDRINERAGELGRSARAHC
GVYWGTYLLIEADMQASRKMPLYDGVEPNDPRYQRWTGKGRLGVQIQKGMSASAVFGADTRIRIDPVNERAWP
ATSTLGWSERRRLQHTTLHLRVSSDGAAPIWAAWPMSMHRPFPEGARIKGAVVNLRRVAGREEWTVCITLDVT
DTQRAQCCGEGAVAVDLGWRLLCQPQAHNETGLRVGTWRGEDGAAGTMTLSHHWSGGELKARELRSIRDKAFE
AARDALAVWLASPGDRPAWLAAKTRALGQWRSAHRLAAVAQWWAAHRFDGDAQAFAALETWRYHDHHLWQWET
HQRETTLRDRREQYRIFAAGLARRYRTLVLEAFDLRKLARLPAPEQVDGEAQAPRSQRQLVAPSELRDALVKA
FVARGGEVVEVSAVDSTRICHACGVVELWDQAAELRHTCSACGVEWDQDDNAGANLLTRYRERPSGDETPGPA
RKAEKTGKEGSKWARAKALRAERDTRTGAARKALAKCAE (SEQ ID NO: 101)
>3300018025|Ga0187885_10005575_2
[aquatic-freshwater-peatland]
MEDVDLQYRMRYSCHNDLVAVELERRYTFRAYRSTLPEYAVVEQPYLELKKQRDAVREEIKLIRQKSRTRVET
PEQNARVAALNAELKKQDVFLKIAAKKVSGDLGLVAVGKEADEVAKAATKAILDDYAARGLTWGTRALVVQEL
QAAKNAERDPKIHPWDNSGRIGLQLQGKNLSEEMVASGKHIASEQKRLRAMTKELGKKSKVVESFAERLLKMK
QDRYAQKTPENRGLPISGLADDTRLQIVVPPEIAYQAASTRRGDRRRAARTTMKMRIGSTPKNAPIWMECKVT
MHRQLPADGIIKWAWIRKKMLGTHEIYHLQLIIEAPSFEQKIAVADRMEAIAVDVGWRVREKNVLRIAYLVDT
AGNRKEILLPTSIVEKLKHADSLRGKEDDAFNAIQDRLMEWIGLNKPILPAWFQDTFQFLAQSRSSKNLAWNV
REWGRRRFAGDTLIYEEMTAWRRQFLHLYEWETNERAKAMGERKNFFRHVGLDLARSAHNVLLEDFKLAKIVE
NAQPEEDDDNPQTQRHNRVMSAISEFRQAIASACSAWRSTLWKLPAAYTTQDCHACHQEKDKHSKWDAAPAIV
HTCQEKCGKTWDQDYNASMNLLGAWLRSRRTNRAA (SEQ ID NO: 102)
>3300018025|Ga0187885_10005575_1
[aquatic-freshwater-peatland]
MVRKSTEDPTRIWSFRITEITSPMEDVDLQYRMRYSCHNDLVAVELERRYTFRAYRSTLPEYAVVEQPYLELK
KQRDAVREEIKLIRQKSRTRVETPEQNARVAALNAELKKQDVFLKIAAKKVSGDLGLVAVGKEADEVAKAATK
AILDDYAARGLTWGTRALVVQELQAAKNAERDPKIHPWDNSGRIGLQLQGKNLSEEMVASGKHIASEQKRLRA
MTKELGKKSKVVESFAERLLKMKQDRYAQKTPENRGLPISGLADDTRLQIVVPPEIAYQAASTRRGDRRRAAR
TTMKMRIGSTPKNAPIWMECKVTMHRQLPADGIIKWAWIRKKMLGTHEIYHLQLITEAPSFEQKIAVADRMEA
IAVDVGWRVREKNVLRIAYLVDTAGNRKEILLPTSIVEKLKHADSLRGKEDDAFNAIQDRLMEWIGLNKPILP
AWFQDTFQFLAQSRSSKNLAWNVREWGRRRFAGDTLIYEEMTAWRRQFLHLYEWETNERAKAMGERKNFFRHV
GLDLARSAHNVLLEDFKLAKIVENAQPEEDDDNPQTQRHNRVMSAISEFRQATASACSAWRSTLWKLPAAYTT
QDCHACHQEKDKHSKWDAAPAIVHTCQEKCGKTWDQDYNASMNLLGAWLRSRRTNRAA (SEQ ID NO:
103)
>3300018057|Ga0187858_10035455_2
[aquatic-freshwater-peatland]
MSAILVYKFGLLRPVDNATMVHQQVRAAHDYRNDLTMIERGRRAAIRSVLESEPDVAAALTGARAARALLDAA
LAVVASARASARTRAAGAPATGDVKSVRAVLHAAEGTFRQALQAVRTRSHVVSETDRINERAGELGRSARAHC
GVYWGTYLLIEADMQASRKMPLYDGVEPNDPRYQRWTGKGRLGVQIQKGMSASAVFGADTRIRIDPVNERAWP
ATSTLGWSERRRLQHTTLHLRVSSDGAAPIWAAWPMSMHRPFPEGARIKGAVVNLRRVAGREEWTVCITLDVT
DTQRAQCCGEGAVAVDLGWRLLCQPQAHNETELRVGTWRGEDGAAGTMTLSHHWSGGELKARELRSIRDKAFE
AARDALAVWLASPGDRPAWLAAKTRALGQWRSAHRLAAVAQWWAAHRFDGDAQAFAALETWRYHDHHLWQWET
HQRETTLRDRREQYRIFAAGLARRYRTLVLEAFDLRKLARLPAPEQVDGEAQAPRSQRQLVAPSELRDALVKA
FVARGGEVVEVSAVDSTRICHACGVVELWDQAAELRHTCSACGVEWDQDDNAGANLLTRYRERLGGDETPGPA
RKAEKTGKEGSKWARAKALRAERDTRTGAARKALAKCAE (SEQ ID NO: 104)
>3300012183|Ga0136624_1011435_1
[aquatic-freshwater-polar desert sand]
MSTLVYAYGCAPNTPICEEVDEQLHLAHEFYNKLVELEIRHENALDAMWREYPDIASMMDQIDTTDLIITELK
KRGKAERVENVSTVTSEPLALELKRAKRGQKETRAALRTAKNRIKEDVALPKKHLLAEHQARAKAARIDFAHR
GLYWGTYNRVWADMKVAVEGVIRKRTGGEPARLHFRRWDGTGTLAVQLQRQDGDPPRDPQGLAEGTTKWRNVF
SVAPWMPPAEFDSMTRPAQLRIAEQGRVRMNVGASRVVKIPVLVHRMLPPDADVLGASLTVTRVAGRRRASVS
VIVNLPDAAPVGDDGPRVSVTLGWSSVPHGIQVAKLSADRPLRIPADIADLVHRGPDPHTTEITVPAAWCNRL
DSAMGLQSRRDTALDAIRSELVEYLRAHPDTSDRPITTTEVARWKAPARFAAVALRWRNNPPLPHGKMIAATL
EAWRRTDRRRWEAETHTRRRALGCRRDGYRRVAAWLARECSEVTMSSTDLSKLAHRTEVGASASNAVPEEVAQ
LARQQRVLVAPSELRESIVAACRREGVSVASGAVRAPVSENARSA (SEQ ID NO: 105)
>3300012682|Ga0136611_10000100_4
[aquatic-freshwater-polar desert sand]
MKSTLNWCYGAKTPDIEQAVSDAIFAAHTYRNQLCALELEKRARHYQVLVELSPDYVAACDAVTLVEVAAQAV
EDLITAEKVTQRTQTPKNIKHLRDRATALAAELQVKRAVRKVAQCSAYAMPAVIAALDRSTAQHKAARKQAKQ
ASGLYWGTEATVTESCRDFHKGPPPTFKRYDGTGQLSVQLQGGLDCADAERYNTLCYLGDSLGGKRRECFIRI
GSDNRAPVFACVPIVFHRALPAGEIKRAYLERRKIASHVRWTIRFTIDIERDIPDRPMPGEVAIHTGWRMEEG
SLRVATWLASDGSTGTLRLSQEHCADYLRLDSLEANRAAGLNEVIAELRTWAKSRELPEFLTEVKPHLHLWKS
QARLAKLVWHWAEARFDGDSAMFERLDSWRKTDKHLWQHHRRLTVRISRRRRDAYRVFAKSLSERYGVAILAP
IQVQKLTKKPTETRPPEDWELDQTQSRRHAAWAAVSDLTSCIRERFPLRCITVSSVNMTKECVNCGEINKADG
RKIQCRGCGQTYDCDDNAVANTLARGDAALLDGALLALVTEQELKEAAKQAKLVKLQEANNAARTTRQTDL
(SEQ ID NO: 106)
>3300013127|Ga0172365_10004082_5
[aquatic-freshwater-sediment]
MFGHTSDPSLIFRYGALPPVEDGPVLEQMRAAHRYRNKLVEIERDRREKAAAIVSAASPDLAGLERQYAELGE
QVESAAAEIKATNQRARKQRATLEQRAKLRTLRAERAEVYARLKEAKHTAYHSLAARAALDQLDAVTLDATKA
ARATCSVYWGTYLQIEAGLGSIRKGPPPRFLRWTGDGKLAVQIQGGMSRQEAEVGDSRLKIATLERRGKATNV
YLRIGTDEMRNPIWAIVPVIFHRPIPDDAQIKWVYLLARRVGTHTRWAVCFVLSRATGWGKPDLATDGAVGLD
LGWRILDHGLRVAYWCGSDGAGEEIVLPLRDVSRWQKADDLRAIRGKNFDAARDELALWLAGRDLPDWLIEQT
RALRQWRNATRLAALAIHWREDRFTGDEEAFAPLEAWRTQDKHLLEWEANQRRKAVAWRDDFYRRVAADLSRR
YKTLVIEDCNWREMGRLPEVGESNESGRAGSYRVIAAVGSLARVLRERFAETVSADPAYTTQRCHVCGQLAQA
ETRTSVWVKCNHCGEAWDQDRNAALNLLSAASGAVT (SEQ ID NO: 107)
>3300013127|Ga0172365_10004082_3
[aquatic-freshwater-sediment]
MIFRYGALPPVEDGPVLEQMRAAHRYRNKLVEIERDRREKAAAIVSAASPDLAGLERQYAELGEQVESAAAEI
KATNQRARKQRATLEQRAKLRTLRAERAEVYARLKEAKHTAYHSLAARAALDQLDAVTLDATKAARATCSVYW
GTYLQIEAGLGSIRKGPPPRFLRWTGDGKLAVQIQGGMSRQEAEVGDSRLKIATLERRGKATNVYLRIGTDEM
RNPIWAIVPVIFHRPIPDDAQIKWVYLLARRVGTHTRWAVCFVLSRATGWGKPDLATDGAVGLDLGWRILDHG
LRVAYWCGSDGAGEEIVLPLRDVSRWQKADDLRAIRGKNFDAARDELALWLAGRDLPDWLIEQTRALRQWRNA
TRLAALAIHWREDRFTGDEEAFAPLEAWRTQDKHLLEWEANQRRKAVAWRDDFYRRVAADLSRRYKTLVIEDC
NWREMGRLPEVGESNESGRAGSYRVIAAVGSLARVLRERFAETVSADPAYTTQRCHVCGQLAQAETRTSVWVK
CNHCGEAWDQDRNAALNLLSAASGAVT (SEQ ID NO: 108)
>3300013127|Ga0172365_10033732_1
[aquatic-freshwater-sediment]
MAICKVYRYGLLPPTENRDLVLKTLRLAHEYRNKLVEIDRQERAEIRAVQTSHGSIPALAAAAKSAIQAKETA
YQAIKAHKAQDRTRKVPEPLKATYEAAKAAASAASQALWQARAALRGDPTVAIRRDEISLRYNEKRKAARAAS
GIYHGTYMRVEAADQQARKMTPLWDGVEPSDVKFARWRGDGGVGLQMKEKPGPADLPTSRWCRIEPRGAPKGA
DPSSKRSAKRRHCTLALRVGSEEREPVWARWPMVMHRPLPEDGEILWVTVTLRHVGPRQEWVALFTVRHEDKR
QVPPAEPVDRVGVDIGWRKLEGGGVRVAAWRTDSGAEGELVLDEHMLGQLRKADDLRSIRDKNLDAARASLVA
AMPGMSLPDWFPKNVWQWRAPARFSNLAKRWKQNRFPGDDLPYAQLEAWRYHDHHLWAWETSQRTKALRHRLD
VYRVFAARMARTYTGLVIEDWDMRDTAEKPDAHEQEGDNEQARSNRVKSAVSELRRALVQAFVNVAKVPAAYT
TQTCSACGAIEKWDQAAELEHTCSACGAQWDQDYNAARNLLAYVEQPGGPDNGGVARDEKKPNDGAEVQESKW
AKAKRMGKEKRDRVDTARNTVPSAAE (SEQ ID NO: 109)
>3300013128|Ga0172366_10016188_4
[aquatic-freshwater-sediment]
MFGHTSDPSLIFRYGALPPVEDGPVLEQMRAAHRYRNKLVEIERDRREKAAAIVSAASPDLAGLERQYAELGE
QVESAAAEIKATNQRARKQRATLEQRAKLRTLRAERAEVYARLKEAKHTAYHSLAARAALDQLDAVTLDATKA
ARATCSVYWGTYLQIEAGLGSIRKGPPPRFLRWTGDGKLAVQIQGGMSRQEAEVGDSRLKIATLERRGKATNV
YLRIGTDEMRNPIWAIVPVIFHRPIPDDAQIKWVYLLARRVGTHTRWAVCFVLSRATGWGKPDLATDGAVGLD
LGWRILDHGLRVAYWCGSDGAGEEIVLPLRDVSRWQKADDLRAIRGKNFDAARDELALWLAGRDLPDWLIEQT
RALRQWRNATRLAALAIHWREDRFTGDEEAFAPLEAWRTQDKHLLEWEANQRRKAVAWRDDFYRRVAADLSRR
YKTLVIEDCNWREMGRLPEVGESNESGRAGSYRVIAAVGSLARVLRERFAETVSADPAYTTQRCHVCGQLAQA
ETRTSVWVKCNHCGEAWDQDRNAALNLLSAASGAVT (SEQ ID NO: 107)
>3300013128|Ga0172366_10018111_5
[aquatic-freshwater-sediment]
MSGEEFLLDQLRARVDYWNRLVEIERDFQAEKEQLLSAASAEMEQLATYIALTDGKLTEALSAGARARSQART
RRTPEPLAAEIAELRDRLRELRKQYREVRRTTFGNEKVKAALRTLGSERTAVIRKARREHVLKGLWWGNYLDV
ELAYKTARQKAGSRLRFQRTGPEGRVSVWFQHGLPTSDVWGKDSRLTIARVPEEAWTSDVRSVRRRLARTRVW
LRAGSNPDRSPRLIEAEMVMHRPLPHGLIRHASIIRERIASHYRHRLVITVAVQDIPTRDGREVGIDIGWRLF
EDRLRVAVAVDEENQLEELSLPQEMLGGFAQVRDLQAVRDTHFNGAKAMLAAFLHTAQMPDWLRDATSTLTQW
RSQGRLTALALQWRDRRFKDDAVYAMLEAWRKRDKHLWEWQANLRDKLLARRREMYRLWAISIARRYGTVVIE
EFDLRRIVSEDNIDVADRMRFIAALSQLRSILEHTCAREGVRIVKVPASYTTQDCAFCANREQFDARKEVRHR
CSKCGAEWDQDENAARNLLKRAKGSQVSRKEV (SEQ ID NO: 110)
>3300013129|Ga0172364_10001281_26
[aquatic-freshwater-sediment]
MAVEAQFRAAQWYRNRLIEITNKSREKYQQLMLRIPEIARLQETIDADKALKESLREEIKVASAKARKNVPLR
PGLREQIASLTKAIKENALTLRAAKDKAKAQIAEETNALYAETAAEQKALYNEAGQPGEIVHRKEGHPDIREP
RVPLAWGTRLLMNKAHEQACSTGMPLKVRHDPVGRIGVQLQKGRTISQIFSGKDGFLRIEPVPDDTWDPRPQN
APKKGERLTREQHKARKGTGGKTKSRTRVHLNIGEGRGEDRPFATFPITLYNRKLPVDGKVLWAWILRERIGT
RMEYKLQLSVESNTFKCESDGHGAIAFDIGWRVRSKNNLRIAYWFDDYGQSGEILLPEIIPSGLAKADSLQAI
RKRKFNRMRALLSKAKADAIKTGMAIPPALLTETETLSAWRSEDRLRRLVKHIWPNHRFAGDERWFNIAKNWL
HKELHLYQWECDERQQATARRTNFYRHTALEFARKYQTCVFENFKLTRIAVKEPVESEKADTPSNIQHNRVVS
ALSDFRDAFKNKMIFAKVPMEFTTIVCHNCRHPEKFNAAKELIRTCPKCNTTWDQDLNAAKNILSRFHCEGTS
GTDMGVQAA (SEQ ID NO: 111)
>3300013129|Ga0172364_10017363_4
[aquatic-freshwater-sediment]
MFGHTSDPSLIFRYGALPPVEDGPVLEQMRAAHRYRNKLVEIERDRREKAAAIVSAASPDLAGLERQYAELGE
QVESAAAEIKATNQRARKQRATLEQRAKLRTLRAERAEVYARLKEAKHTAYHSLAARAALDQLDAVTLDATKA
ARATCSVYWGTYLQIEAGLGSIRKGPPPRFLRWTGDGKLAVQIQGGMSRQEAEVGDSRLKIATLERRGKATNV
YLRIGTDEMRNPIWAIVPVIFHRPIPDDAQIKWVYLLARRVGTHTRWAVCFVLSRATGWGKPDLATDGAVGLD
LGWRILDHGLRVAYWCGSDGAGEEIVLPLRDVSRWQKADDLRAIRGKNFDAARDELALWLAGRDLPDWLIEQT
RALRQWRNATRLAALAIHWREDRFTGDEEAFAPLEAWRTQDKHLLEWEANQRRKAVAWRDDFYRRVAADLSRR
YKTLVIEDCNWREMGRLPEVGESNESGRAGSYRVIAAVGSLARVLRERFAETVSADPAYTTQRCHVCGQLAQA
ETRTSVWVKCNHCGEAWDQDRNAALNLLSAASGAVT (SEQ ID NO: 107)
>3300013129|Ga0172364_10018773_2
[aquatic-freshwater-sediment]
MSGEEFLLDQLRARVDYWNRLVEIERDFQAEKEQLLSAASAEMEQLATYIALTDGKLTEALSAGARARSQART
RRTPEPLAAEIAELRDRLRELRKQYREVRRTTFGNEKVKAALRTLGSERTAVIRKARREHVLKGLWWGNYLDV
ELAYKTARQKAGSRLRFQRTGPEGRVSVWFQHGLPTSDVWGKDSRLTIARVPEEAWTSDVRSVRRRLARTRVW
LRAGSNPDRSPRLIEAEMVMHRPLPHGLIRHASIIRERIASHYRHRLVITVAVQDIPTRDGREVGIDIGWRLF
EDRLRVAVAVDEENRLEELSLPQEMLGGFAQVRDLQAVRDTHFNGAKAMLAAFLHTAQMPDWLRDATSTLTQW
RSQGRLTALALQWRDRRFKDDAVYAMLEAWRKRDKHLWEWQANLRDKLLARRREMYRLWAISIARRYGTVVIE
EFDLRRIVSEDNIDVADRMRFIAALSQLRSILEHTCAREGVRIVKVPASYTTQDCAFCANREQFDARKEVRHR
CSKCGAEWDQDENAARNLLKRAKGSQVSRKEV (SEQ ID NO: 112)
>3300013129|Ga0172364_10045136_2
[aquatic-freshwater-sediment]
MAICKVYRYGLLPPTENRDLVLKTLRLAHEYRNKLVEIDRQERAEIRAVQTSHGSIPALAAAAKSAIQAKETA
YQAIKAHKAQDRTRKVPEPLKATYEAAKAAASAASQALWQARAALRGDPTVAIRRDEISLRYNEKRKAARAAS
GIYHGTYMRVEAADQQARKMTPLWDGVEPSDVKFARWRGDGGVGLQMKEKPGPADLPTSRWCRIEPRGAPKGA
DPSSKRSAKRRHCTLALRVGSEEREPVWARWPMVMHRPLPEDGEILWVTVTLRHVGPRQEWVALFTVRHEDKR
QVPPAEPVDRVGVDIGWRKLEGGGVRVAAWRTDSGAEGELVLDEHTLGQLRKADDLRSIRDKNLEAARAALVA
AMPGMSLPNWFPKNVWQWRAQARFSNLAKRWKQNRFPGDDLPYAQLEAWRYHDHHLWAWETSQRTKALRHRLD
VYRVFAARMARTYTGLVIEDWDMRDTAEKPDAHEQEGDNEQARSNRVKSAVSELRRALVQAFVNVAKVPAAYT
TQTCSACGAIEKWDQAAELEHTCSACGAQWDQDYNAARNLLAYVEQPGGPDNGGVARDEKKPNDGAEVQESKW
AKAKRMGKEKRDRVDTARNTVPSAAE (SEQ ID NO: 113)
>3300013130|Ga0172363_10000480_22
[aquatic-freshwater-sediment]
MAVEAQFRAAQWYRNRLIEITNKSREKYQQLMLRIPEIARLQETIDADKALKESLREEIKVASAKARKNVPLR
PGLREQIASLTKAIKENALTLRAAKDKAKAQIAEETNALYAETAAEQKALYNEAGQPGEIVHRKEGHPDIREP
RVPLAWGTRLLMNKAHEQACSTGMPLKVRHDPVGRIGVQLQKGRTISQIFSGKDGFLRIEPVPDDTWDPRPQN
APKKGERLTREQHKARKGTGGKTKSRTRVHLNIGEGRGEDRPFATFPITLYNRKLPVDGKVLWAWILRERIGT
RMEYKLQLSVESNTFKCESDGHGAIAFDIGWRVRSKNNLRIAYWFDDYGQSGEILLPEIIPSGLAKADSLQAI
RKRKFNRMRALLSKAKADAIKTGMAIPPALLTETETLSAWRSEDRLRRLVKHIWPNHRFAGDERWFNIAKNWL
HKELHLYQWECDERQQAIARRTNFYRHTALEFARKYQTCVFENFKLTRIAVKEPVESEKADTPSNIQHNRVVS
ALSDFRDAFKNKMIFAKVPMEFTTIVCHNCRHPEKFNAAKELIRTCPKCNTTWDQDLNAAKNILSRFHCEGTS
GTDMGVQAA (SEQ ID NO: 111)
>3300013130|Ga0172363_10009486_8
[aquatic-freshwater-sediment]
MFGHTSDPSLIFRYGALPPVEDGPVLEQMRAAHRYRNKLVEIERDRREKAAAIVSAASPDLAGLERQYAELGE
QVESAAAEIKATNQRARKQRATLEQRAKLRTLRAERAEVYARLKEAKHTVYHSLAARAALDQLDAVTLDATKA
ARATCSVYWGTYLQIEAGLGSIRKGPPPRFLRWTGDGKLAVQIQGGMSRQEAEVGDSRLKIATLERRGKATNV
YLRIGTDEMRNPIWAIVPVIFHRPIPDDAQIKWVYLLARRVGTHTRWAVCFVLSRATGWGKPDLATDGAVGLD
LGWRILDHGLRVAYWCGSDGAGEEIVLPLRDVSRWQKADDLRAIRGKNFDAARDELALWLAGRDLPDWLIEQT
RALRQWRNATRLAALAIHWREDRFTGDEEAFAPLEAWRTQDKHLLEWEANQRRKAVAWRDDFYRRVAADLSRR
YKTLVIEDCNWREMGRLPEVGESNESGRAGSYRVIAAVGSLARVLRERFAETVSADPAYTTQRCHVCGQLAQA
ETRTSVWVKCNHCGEAWDQDRNAALNLLSAASGAVT (SEQ ID NO: 114)
>3300013130|Ga0172363_10014785_2
[aquatic-freshwater-sediment]
MPRTRSKALPTKVYKYGCSAPLENQELVKEQWRLANRYRNALLENSLQWRSACQAVVSAEDTELRDIDTCIDI
LNVNIDSLISEKKKRNSAARKRLKHPDLEAKITDCKTERKRLYARRKLVKDIAYRSPGNKQALDAVHQAFKAA
NREARKIASKSGLGWGTYLQIEDSAKNFAKGKPAKFKRFDRDAGGSIAIQIQTPQGAPHLTVDRLLEGKDNRL
QLIPQPDGIHALVRLCVGGVDMSQRRSANNPPCYVTVRMNMHRPLPPDSHITWVKLIARRVGLKLKWDVHFTV
ARGSGFAPTIGSGVVGIDIGYRHLDDGSLRVAAWAGSDGRHGELILPATLVRALTRKQELQALRDEKFNVVRA
SLVEWCKHVSIPDWLKEAASTLALWRSQKRLHTLAQQWSQNRFTGDSSMYIVLDAWRKEDRHHLAWLANESEQ
GICRRKDIYGKFVAELRRHYGTVGLEDIDLREHAQADNLSKGVQNQRSIAAHSTLRSLLSTMQVIKVPAANTT
RRCHYCGHINNVGTDVGYYCDDCGWTGDRDYNASQNILREATYSLRAGGRSHVAT (SEQ ID NO: 115)
>3300013133|Ga0172362_10012573_3
[aquatic-freshwater-sediment]
MFGHTSDPSLIFRYGALPPVEDGPVLEQMRAAHRYRNKLVEIERDRREKAAAIVSAASPDLAGLERQYAELGE
QVESAAAEIKATNQRARKQRATLEQRAKLRTLRAERAEVYARLKEAKHTAYHSLAARAALDQLDAVTLDATKA
ARATCSVYWGTYLQIEAGLGSIRKGPPPRFLRWTGDGKLAVQIQGGMSRQEAEVGDSRLKIATLERRGKATNV
YLRIGTDEMRNPIWAIVPVIFHRPIPDDAQIKWVYLLARRVGTHTRWAVCFVLSRATGWGKPDLATDGAVGLD
LGWRILDHGLRVAYWCGSDGAGEEIVLPLRDVSRWQKADDLRAIRGKNFDAARDELALWLAGRDLPDWLIEQT
RALRQWRNATRLAALAIHWREDRFTGDEEAFAPLEAWRTQDKHLLEWEANQRRKAVAWRDDFYRRVAADLSRR
YKTLVIEDCNWREMGRLPEVGESNESGRAGSYRVIAAVGSLARVLRERFAETVSADPAYTTQRCHVCGQLAQA
ETRTSVWVKCNHCGEAWDQDRNAALNLLSAASGAVT (SEQ ID NO: 107)
>3300013133|Ga0172362_10022806_8
[aquatic-freshwater-sediment]
MPRTRSKALPTKVYKYGCSAPLENQELVKEQWRLANRYRNALLENSLQWRSACQAVVSAEDTELRDIDTCIDI
LNVNIDSLISEKKKRNSAARKRLKHPDLEAKITDCKTERKRLYARRKLVKDIAYRSPGNKQALDAVHQAFKAA
NREARKIASKSGLGWGTYLQIEDSAKNFAKGKPAKFKRFDRDAGGSIAIQIQTPQGAPHLTVDRLLEGKDNRL
QLIPQPDGIHALVRLCVGGVDMSQRRSANNPPCYVTVRMNMHRPLPPDSHITWVKLIARRVGLKLKWDVHFTV
ARGSGFAPTIGSGVVGIDIGYRHLDDGSLRVAAWAGSDGRHGELILPATLVRALTRKQELQALRDEKFNVVRA
SLVEWCKHVSIPDWLKEAASTLALWRSQKRLHTLAQQWSQNRFTGDSSMYIVLDAWRKEDRHHLAWLANESEQ
GICRRKDIYGKFVAELRRHYGTVGLEDIDLREHAQADNLSKGVQNQRSIAAHSTLRSLLSTMQVIKVPAANTT
RRCHYCGHINNVGTDVGYYCDDCGWTGDRDYNASQNILREATYSLRAGGRSHVAT (SEQ ID NO: 115)
>3300013133|Ga0172362_10025871_2
[aquatic-freshwater-sediment]
MAICKVYRYGLLPPTENRDLVLKTLRLAHEYRNKLVEIDRQERAEIRAVQTSHGSIPALAAAAKSAIQAKETA
YQAIKAHKAQDRTRKVPEPLKATYEAAKAAASAASQALWQARAALRGDPTVAIRRDEISLRYNEKRKAARAAS
GIYHGTYMRVEAADQQARKMTPLWDGVEPSDVKFARWRGDGGVGLQMKEKPGPADLPTSRWCRIEPRGAPKGA
DPSSKRSAKRRHCTLALRVGSEEREPVWARWPMVMHRPLPEDGEILWVTVTLRHVGPRQEWVALFTVRHEDKR
QVPPAEPVDRVGVDIGWRKLEGGGVRVAAWRTDSGAEGELVLDEHTLGQLRKADDLRSIRDKNLEAARAALVA
AMPGMSLPNWFPKNVWQWRAQARFSNLAKRWKQNRFPGDDLPYAQLEAWRYHDHHLWAWETSQRTKALRHRLD
VYRVFAARMARTYTGLVIEDWDMRDTAEKPDAHEQEGDNEQARSNRVKSAVSELRRALVQAFVNVAKVPAAYT
TQTCSACGAIEKWDQAAELEHTCSACGAQWDQDYNAARNLLAYVEQPGGPDNGGVARDEKKPNDGAEVQESKW
AKAKRMGKEKRDRVDTARNTVPSAAE (SEQ ID NO: 113)
>3300010155|Ga0098047_10009758_2
[aquatic-marine]
MPVKSKMKGDGRIYAYRASLPTKNLEIVQEQLYLVHKYRNRLVELELNRRSQVDQALRDLVPDLEPTELALKQ
LDDQIAAAKDAQKKANIKQRGRKVAKSDRDALKDLKAQRKVLYQKRKQLRKDTFSSTAWKSRQTQIENNAKVE
SKAARASCGLYWGSYAPVEEAARAFRRGAPPRFHRWTGEGKLAVQMQAQAGKPDFTPDTLTSCSSNLLRLELR
PEGIWVDGKRRPKKLGNALLWFRVGSTTVKPKRQPIWAEVPIKLHRPLPSDCKIKWCYLQRRKRGTKTIWEVC
FVLQGEHGAFDPGDQASEGHVGIDVGWRKYEDRLRIAVYSGSDGQEGELCLPDWWLGESRRVERIRGHRDKLL
DAAKTELKAWIKGRESLPDWLTEAGKHMHQWRSASRLAGLCLRWRGELIKPTTDGAAALASLEAWRERDKHLY
EYEAHLRAQLQGSRKDLYRKFAAMLSRKYATAYIEDLDLRKFHQLRAIEEGGDKGTDSIRAYVRDACLSELFD
AIKSRFRHHVKVDPANTTKQCHACSVVDASWVDHAKVDHECSSCSVTWDQDTNAARNLLNSGDEPVTQFGGPA
LAPVLVHTYTHKGPNRARRRARRRRALEKKRLNDAA (SEQ ID NO: 116)
>3300006805|Ga0075464_10026824_2
[aquatic-marine-aqueous]
MRVYKYRAYAPIVGAGIFDAQSRARHRYQNQLIEIERAWCGLDRATKKDPEAQARRKALVKAARQDAARRGLA
WGSYNGASDDVRRAVSALRGAARDEGPRFRRFDGGGRIKVQQQPGARVVVIDGDRVTFRLGHQGAVTVPVVMH
RPIPPDATIKEAQLHRERVADKYKWWVTITVAVPAPPPAPPRGVVGIDLGWARRGGKSERDGRRVAVASFADG
RELQVRCPESILAKIDHARGLRSLRDVKFNVAIAWLREHVCEHGAPEWLRAALRWSHAWRSQAKLAAVVLRWR
DARYDGDDGIYQTLEIWRRRDKHLWTWEVHETRKALAQRREIYRVAAAYIAEHAGEVRVEDIDLAEMAESDDL
PRAARRGRVDTAPSTFLAAVKNACSSRGVTYAVVSAKNTTRKCSGCGVVGRSVVGDTFACGGCGLVADRDANA
ARNIAASAPEAPREPKPKSADLRRAGKARHDAARAAAVKAA (SEQ ID NO: 117)
>3300006805|Ga0075464_10026824_2
[aquatic-marine-aqueous]
MDVRVYKYRAYAPIVGAGIFDAQSRARHRYQNQLIEIERAWCGLDRATKKDPEAQARRKALVKAARQDAARRG
LAWGSYNGASDDVRRAVSALRGAARDEGPRFRRFDGGGRIKVQQQPGARVVVIDGDRVTFRLGHQGAVTVPVV
MHRPIPPDATIKEAQLHRERVADKYKWWVTITVAVPAPPPAPPRGVVGIDLGWARRGGKSERDGRRVAVASFA
DGRELQVRCPESILAKIDHARGLRSLRDVKFNVAIAWLREHVCEHGAPEWLRAALRWSHAWRSQAKLAAVVLR
WRDARYDGDDGIYQTLEIWRRRDKHLWTWEVHETRKALAQRREIYRVAAAYIAEHAGEVRVEDIDLAEMAESD
DLPRAARRGRVDTAPSTFLAAVKNACSSRGVTYAVVSAKNTTRKCSGCGVVGRSVVGDTFACGGCGLVADRDA
NAARNIAASAPEAPREPKPKSADLRRAGKARHDAARAAAVKAA (SEQ ID NO: 118)
>3300009149|Ga0114918_10020022_2
[aquatic-marine-deep subsurface]
MGGKAGTVKTAKKHKHRWVEDLEKDLIENCSCGKSRKSQNSSVIVYGLGKPMFDEEGSECPSCNEESNGEPCG
AHRFIDQMRLGHSYGNKLTELYRASSERYREIIGSASKKMEVIVMKLDDLDDQIKGLNALLKADKDNKEAKKL
KKELTADRKIIRADRKELVEKLKQNKIIQARLKKNNIKLNSEIIKARGEFSKLGLMWGTYNLHEASAKQAQYA
PGRRGDPEFKRWEGHGRIGVQLQGGLPESKVWGDSRSFQIDKVDHETWSKLREDGSPDRAFRRKQCRTKVRVR
IGSAKAKPIWVEFPMTMHRPIPEGADIRDVTILQKKSGTIYRYSLHVQINENKTNQPERSGVVGVNLGWRKHQ
DNTLRVAYWYGDDGRYGEYLLDSEYLEKVKVMDGKQSKRSMALDVIKETFAVWLDGQDNLPEWIQEWRGIKFI
RDWRSSSRLASLVLRWRKNRFDGDALIFENLEEWRRADKHTCNQEGGIRNKNQLRRQDEYRNFAAFLARTYGK
VVVDDTNYANLARKPGPEDDDNKVARKQANLASPGKLRVNIKNACHKHGAIYVAASSKHITATCHKCGTINDW
DKSLSLTHWCSGCNAFWDQDMNAAINLCRSGGGKPPNFEHPGDARIELNDEVNKYDWLIQESAGMAGSKKQPI
ENLAVTL (SEQ ID NO: 119)
>3300006083|Ga0081762_1007854_6
[aquatic-marine-diffuse hydrothermal flow volcanic vent]
MRERARNWPVMVFSYGILPSFLKEEAAINILKEEAYRMNELWNKLVEIGRKYLETYSSNIEEDPAIAPLISQR
KEIENTLEETDKQIKQLRIKLKTKKHPALAELEEKKRELRRQLREIKASIRETKKQVKEKYREVFAQMEEEVK
EAVKKAPLYWCNKEVVRDKFWAAWRGVKNGNIPKFHRFDDRWCLTWRFTGGGMPVKDAFRKVLSGIVPPEVYK
LPTKKRNKMANLTCLFRQGEYRILVPIILHRPLPEGGYIKRVTFVRRPYGRDRVRLFLNFTVEVPPDKYYLPV
REERKGKIAALELGFRKVDGRIRVGVLYDPFTEEKFREIFIPQNIPERLEKVRKGQSKADEELEDIKNDLSKW
LVEPQVLPKLPEEIKKLITNRVAWVKTRDRGVWKVINLLKESGADPAAARNVERRMLKREKFLNDLQRTRIKA
LGARKRFYENLAKEIFDRYEMLIIKDISLKKLALKEMAEQLPDEARWVRFVAALGELVGCLERRAERTKGVLV
KLDPAYLTRTCHICNHINNPNRPEKLFWTCEKCGTKWDQDKNAAVNLYEQGIERLKLAQTG (SEQ ID NO:
120)
>3300010354|Ga0129333_10000304_8
[aquatic-marine-freshwater to marine saline gradient]
MRLGHRYQNDLIAIERGRRLAFAAVMSSDTRIAEAEAKITEIDAKISEAVERARQARVARRTKADTEQTKSEI
RSLKASKAAAVLDLRAIKPLVQSELRPRIAEVDARAHELQISARAHCGVYWGTYLLAEAAAEQAAKTTKGELR
FQRWDGSGQVSVQIQGGADVDDVVGDSDTRLRWPEYVEGIRKAKRTELAMRVSSEKGVPVWARWPMVYHRPLP
TNARIKRAIVSLRMRGPREEWSVEVTIDASTCRLRDRPDGGKVAVHLGWRKEPSGNVRVATWLGDDGDAGTIE
CPERVLTGFAKCESLRSIRDRNLDELRARLVLAREGWPVWLRDATSSLYQWRSPGRFVALAQRWKAAGVAPEH
ASDYGAIEAWRYNDHHLWRWEHDQRLNSTRYRREVYRIAVAELSRRYRRAILMAADWAEMAKLPGIGEGAPDL
PDEARAQRVETAPYVLTEALHSAMTEVVWVDPSYLSQACRHCDHKDTGDTWVRECTSCGKARDIDEAAVRTML
DLEEAGAWSWKKGGAKDESGKVREIRAPKWAKKHATEAAE (SEQ ID NO: 121)
>3300010354|Ga0129333_10000304_10
[aquatic-marine-freshwater to marine saline gradient]
MITRVYRYGLLAPTENSELVRQQMRLGHRYQNDLIAIERGRRLAFAAVMSSDTRIAEAEAKITEIDAKISEAV
ERARQARVARRTKADTEQTKSEIRSLKASKAAAVLDLRAIKPLVQSELRPRIAEVDARAHELQISARAHCGVY
WGTYLLAEAAAEQAAKTTKGELRFQRWDGSGQVSVQIQGGADVDDVVGDSDTRLRWPEYVEGTRKAKRTELAM
RVSSEKGVPVWARWPMVYHRPLPTNARIKRAIVSLRMRGPREEWSVEVTIDASTCRLRDRPDGGKVAVHLGWR
KEPSGNVRVATWLGDDGDAGTIECPERVLTGFAKCESLRSIRDRNLDELRARLVLAREGWPVWLRDATSSLYQ
WRSPGRFVALAQRWKAAGVAPEHASDYGAIEAWRYNDHHLWRWEHDQRLNSTRYRREVYRIAVAELSRRYRRA
ILMAADWAEMAKLPGIGEGAPDLPDEARAQRVETAPYVLTEALHSAMTEVVWVDPSYLSQACRHCDHKDTGDT
WVRECTSCGKARDIDEAAVRTMLDLEEAGAWSWKKGGAKDESGKVREIRAPKWAKKHATEAAE (SEQ ID
NO: 122)
>3300009507|Ga0115572_10029017_2
[aquatic-marine-pelagic marine]
MISRVYKYGAVPLKKFPEVKFPREQFPEEGVEELRRANKLRNSLVWLHRKNNEKFEAARVAADAEYGEIAEKL
DALEKTISQALTAKRQARAKAGTRDAKHPLVKAASETINELTKQRSDLWKALKPARIRADKRVDRKALTKQFD
DAVKVVQHVKETGGLSSHCANEIVRYFKESRSRALNERATLRYRRFDGTGFWFYRFREPGVNKNGVDFDGLLT
GNKTEARDNRNFVLTEKSRRGKRVIYKLRAKIAGGAKKDSKVYGHFDLILHRPIPENARIQSAKILRHRTGDK
FTYTVSFTLKLPDVEQQTVEGSVLGLDIGFREMERNNSYRIATLATNDQSRRVETIDIARENRRGFLARMNHI
DDLRSTMDENATELGKKLLPLLKTAKPLPDSHQQFIFTERLRKTRANVTLDFERSYKMARWFIRAPDEADFYG
PEIVGMVLRWWEENSFKYREMHNLRRKALAERKEVYRMEAARLVGFGIPIAVEKLDMSKWAERKDSDNELSNR
ALSSRFLVAPSELIAAIENAAKREGVPFIKVNAANTSKACHACGTINKALKGELIWTCEECETKHDRDINAAI
NIAKRGILQAKKEKKQ (SEQ ID NO: 123)
>3300017963|Ga0180437_10000100_151
[aquatic-non marine saline and alkaline-hypersaline lake sediment]
MTKTYVYGLPLGPTVNADLVEEQMRLAHKYRNALIEIERERREKVREVYDERDLALEGLVEEDKVAKSELKRA
TEDLKRQRAKTRSRSDTAEQRARVKEARKAAQEVAKRLSEARKELKLDEELQKRLSEANLTASEKSQAAQQGF
SREGLFWGTYLQVDNAMEDSRRDLKMWDEHGQPLDPKFLQWRGDGTVAVQLQGDKHPVEKIFSGEDTFLQVDM
EPPPEGVVSKTRRKKRRGVMRLRVGSTKSRGPVWAEFPIIMHRPLPQGVRIKWAVVKRRMISDRPRWTVHFSL
GLPAEYQHEEFGSGRGAVAVDIGWRKRGEDQIRVAYLVDGDEYAAYLRDRQDPLGRGDELLMEPEVVRGFDKV
ESLQSIRALNQNEMQKSLKGWIKSNKKNLPEWFREDVRYLHSWKSPKRYAGLLRKWGEKRWDGDGEGFQILKD
WLSGTYEESLGRRDGGDRHLWQWKESQEQKSLRRRKDHYRRVAAKLARKYKVLVIEDFKLTETQKHEPPESEK
VEIQAARNQQKEAACYELRMMFVQAFLARGGTVVWVDARMTTQRCFECGCLEPWDAIPEVDHVCVECGAKWDQ
DANAARNIMRLYRNDETLKMIDGSVPVEPKMSRRQKGRKKGKKIVQQRKSQEAAQPSV (SEQ ID NO:
124)
>3300017963|Ga0180437_10000153_25
[aquatic-non marine saline and alkaline-hypersaline lake sediment]
MTRKTSKTKRKKKPGKPRVRGPQLAYVYGLPFGPTKNAELVEKQIVLSQRYNNQCVEAERRLRATLREIYQQH
TLDLMGASDEMREAFTEVKRLEKLLREMQEDLRTKRKRSRSRSDTPQERMRLREVRDLKNEAWAKLRELKNGS
ESDDEPGKEEPRKKVELSDELKARRAEAQQREKQELHEAYVQFKDGTYEKVTETDEELGKLYWGTYLLVNRAR
EASRMSLRDSLWKWNEEKGIWVERDPKFKSLDDEVIFGVELQKGDSVERVLNCQNTMFQLDMEPEMGEEVLRH
RRIRRRGIARIRVGSGGKSGRDPIWAEFPVIMHRPLPPKARIKWAVVKREKITTRLRWTLHLHLEVDSGDCHK
DYGTGRGVVAVDIGWRKRGTETVEMGRKRKKRGLRKQEVEVPRIRIAYLIDDREYAAYLKNPDEGEVGHEQCM
SSKVVAGFQRVETLQQTRQLKQNEMLAELRAWIKARRSALPKWFRESTRGIAKWEAPKRFAWLLRLWRESRWK
GDERGFEILDRWQRGVYDEEARRLEGGDRHLWQWQESQRRKSLLQREDHYRCVDSALAREFKVLVLENIDLSK
MQKHELPGSDKVEIRRARRQQKEAALSEFRETLIQAFLSRGGTVVWVNPAMTTQRCFDCGHDAPWDPIPKVEH
TCEKCGRTWDQDANAARNMMRLYRENKIVKIADGSVLVREMSDAQKNRNKGKKVVRKRKKEEEERNGEGPAPL
ES (SEQ ID NO: 125)
>3300017963|Ga0180437_10000488_78
[aquatic-non marine saline and alkaline-hypersaline lake sediment]
MRVYKYGLLRPTTNADLVHEQIKIGHKYRNKLIELEIKRRDLIRAEVAKSSVVEDDFTDAKLAVEKFKHLDKL
LKQKNAQHRSKRHNNPDLKKDHTKARKEKTKAIKKLEETRRKVLKKCKETIKVFNDQYIEEEKKVRSECAPFW
GTYQVIEDAMKRSRKSLPLWDGLESNNPKFRRFNGIGRVSIQLQKDVIDKNNGMNVDLVFGTTDTRLQVAPVP
EEAWYSPIRSVRRKKSRTVLKMRIGSEGRAPIWAEWPMIMHRPLPDNGRIKRVTVNFRKIGPREEWTADFFIN
DSATLHEQYEVSGAIGLDVGWRLMDDGSLRVAFWEDDEGEKGEFRLSPTLMGAFKKADDLRSIRDKNRDEIKE
FLIQHFSKNPMPSWMLDFVKGKEDSKRPTNKQACVYLSKWKSIAKLTKLVQTWKEKGITKRHQKAYNRFEDWR
YHDFHLWQWETSQRKKAERRRKDNYRVLASKLSKQYHTLVLENFDLRKVARKKAADDDSLDIKAANHNRFVAN
ISELRLVLRNAFEKCGEIELVKAVNTTKICFWCGFINNFDQAKNLIHQCYSCGVVWDQDDNASTNIRRRRKQG
(SEQ ID NO: 126)
>3300017963|Ga0180437_10000692_13
[aquatic-non marine saline and alkaline-hypersaline lake sediment]
MGAARRRNPKVAAARKGKPPPKATGNCRNYRYGAHEPIANLDKVLDEMRGAHDLRNVLTCINRARSEMITAAL
GEHQSYKKATADLAALHQRRDKLEAQIRQQNSASRKRLGRHSPLSSELDTVRKRIDEGRTALKKLRRKLLKKD
PALKAVVEAADDMAKRETTRAEDACGLYWCTRNEQTGKRAKLRRFKKWRDSEATISVQIPGGLTVEQLLGGEN
NQARLELRPEGVWVQGARKRKVEPAEAARNKLRLDEDGYPMRKLGTAILHLRCMSDEDGKPIWAEVPITYHRE
IPADAKIKRCYLHRFRVGNRYHWSVRFSLERGKKGDDSWLHPRVATTGTAAIDIGWRWFPDRLRVAVWAGSDG
AEGELCLPKWWLDEMYSVRLDQRERDVLFNEIVSLVLPWFRSRRGELSDYVVQAIKTMHSWRDKGRLAALSMR
WRDDLAADPGANPAHVAMSIRLEEWRKRDKHIWCEEVNLRSQLQGSRKDLYRRFAAMLTSRYGRIVVEEFDLS
AVQKLPPASIDDGTYSRVKRHKGDAACSHLVGALKDAARQLDKKNPKWTTKRCHVCGKTERKWENPGELEHTC
KHCGVLWDRDVNAARNILAASGVAVDWTRPPLAPAARMTYPQVENREMRRSRRRKEALETTRASGDRQTA
(SEQ ID NO: 127)
>3300017963|Ga0180437_10006965_20
[aquatic-non marine saline and alkaline-hypersaline lake sediment]
MLKRGERGERGERGERGERGERGASMPRNPKKKMDGVGRNYKYGAYAPLTNEDEVRWQMVLGHRYRNRLVEVE
LDIRAKRDAIIQEVAPGLLALEDEINKMGEIIALHEKAQKEQNKKQRGRDVHPGVANLLRDLKAEKKGLVGKR
KALKAELFASDRWKQDGGDHLNQQRKEGRSNAYSEYKDEGLWWGVRSKILRESGSFISGAPPKFRGWHKSVRS
TRFVVQTQGGLTEEELLSGRNTTARLTLFPDGVWAEGKRRPKRMGDAILDLRIGSDEHRKPIWTSIPISYDRH
LPAEAKIKWIYLFKRLLVDKEKWEVVFALECPAAADYDAIRRRGGDKKRTNRNRKGIRLRKYAQSGVVAIDVG
WRKFEDYLLVGTCAASDGREWELRLDGNWLGQLRRVEGMQSYRDVLLNEQVKWLHPWLKSRKGSLPELLLPPS
RNLEKWGQRSVARLVKQWMRERPIGTLDEQRALARLDEWLSRENHVWHFQANLQHQLLLYRREEYRVWARRIG
EVYRCVVLEKLNYGDWHKKPPVERGGSVKADMAKKYLRDAGLSHLKNALKGGVLQVADVPHEGTTVNCHACGH
ADVWEDPAAKDHVCETCGLRWDRDVNAARNILAASGVTVAWEREPLAPTEAWTACSKSGLNRAQRRAISSSLA
IDSEIALAVGGSE (SEQ ID NO: 128)
>3300017963|Ga0180437_10006965_20
[aquatic-non marine saline and alkaline-hypersaline lake sediment]
MPRNPKKKMDGVGRNYKYGAYAPLTNEDEVRWQMVLGHRYRNRLVEVELDIRAKRDAIIQEVAPGLLALEDEI
NKMGEIIALHEKAQKEQNKKQRGRDVHPGVANLLRDLKAEKKGLVGKRKALKAELFASDRWKQDGGDHLNQQR
KEGRSNAYSEYKDEGLWWGVRSKILRESGSFISGAPPKFRGWHKSVRSTRFVVQTQGGLTEEELLSGRNTTAR
LTLFPDGVWAEGKRRPKRMGDAILDLRIGSDEHRKPIWTSIPISYDRHLPAEAKIKWIYLFKRLLVDKEKWEV
VFALECPAAADYDAIRRRGGDKKRTNRNRKGIRLRKYAQSGVVAIDVGWRKFEDYLLVGTCAASDGREWELRL
DGNWLGQLRRVEGMQSYRDVLLNEQVKWLHPWLKSRKGSLPELLLPPSRNLEKWGQRSVARLVKQWMRERPIG
TLDEQRALARLDEWLSRENHVWHFQANLQHQLLLYRREEYRVWARRIGEVYRCVVLEKLNYGDWHKKPPVERG
GSVKADMAKKYLRDAGLSHLKNALKGGVLQVADVPHEGTTVNCHACGHADVWEDPAAKDHVCETCGLRWDRDV
NAARNILAASGVTVAWEREPLAPTEAWTACSKSGLNRAQRRAISSSLAIDSEIALAVGGSE (SEQ ID NO:
129)
>3300017963|Ga0180437_10073069_2
[aquatic-non marine saline and alkaline-hypersaline lake sediment]
MGNVPLLEQQTKEAGERVSEASKSVKQYRSKNRTRKVPEWMRTELDAARLAKKDVAAKLREVRKQLRTPEIQA
EMDRINGLAGELRRSARAHCGLYWGSYLLVEDEMASSSKSPLYDKENPNEPNDPGFVRWHGEGHLGVQIQGGM
PTGLVQFHSTLLQIKKVDPVEGKLGKSHYLLRMRVGSNGRKPIWGEWPMVMHRPLDPGQIKGAAVSCRRIGLR
WQWTVEITVDKESGCRPRPCGYGQVAVNFGWRKVDGGIRVAYAVDYEGNEQELVLPDGEAEGIVRPSRVRERL
TDEQRAIQKRDGIIYGKACRLSDDGKSYEAEKVLSGRPDLLSRLSSRVRPARKPPILPALRKSDELRSIRDQR
FGHTLQSLIKWLKTIEVPCWLKDRTSHIHKWKSQNRLRKLIGYWRSNRFDGDETMFQSLEVWNHRDEHLLSWE
DSQRKKSQRRRRDLYRVWAAKLADRYYTIVLNSHDMAETARKPKVEATDDIPLSRSNRQLVSPSELKEALINA
KRSREGQTVENPAQKVTHTCHNCETEQDFDAASSIEHTCLACGETWDQDRNAAINSLRWFVERPSDAKILGTA
RKIKNLDENGVEKETRRQRISRLKREKDARMKALANDAASS (SEQ ID NO: 130)
>3300017971|Ga0180438_10000090_91
[aquatic-non marine saline and alkaline-hypersaline lake sediment]
MTRKTSKTKRKKKPGKPRVRGPQLAYVYGLPFGPTKNAELVEKQIVLSQRYNNQCVEAERRLRATLREIYQQH
TLDLMGASDEMREAFTEVKRLEKLLREMQEDLRTKRKRSRSRSDTPQERMRLREVRDLKNEAWAKLRELKNGS
ESDDEPGKEEPRKKVELSDELKARRAEAQQREKQELHEAYVQFKDGTYEKVTETDEELGKLYWGTYLLVNRAR
EASRMSLRDSLWKWNEEKGIWVERDPKFKSLDDEVIFGVELQKGDSVERVLNCQNTMFQLDMEPEMGEEVLRH
RRIRRRGIARIRVGSGGKSGRDPIWAEFPVIMHRPLPPKARIKWAVVKREKITTRLRWTLHLHLEVDSGDCHK
DYGTGRGVVAVDIGWRKRGTETVEMGRKRKKRGLRKQEVEVPRIRIAYLIDDREYAAYLKNPDEGEVGHEQCM
SSKVVAGFQRVETLQQTRQLKQNEMLAELRAWIKARRSALPKWFRESTRGIAKWEAPKRFAWLLRLWRESRWK
GDERGFEILDRWQRGVYDEEARRLEGGDRHLWQWQESQRRKSLLQREDHYRCVDSALAREFKVLVLENIDLSK
MQKHELPGSDKVEIRRARRQQKEAALSEFRETLIQAFLSRGGTVVWVNPAMTTQRCFDCGHDAPWDPIPKVEH
TCEKCGRTWDQDANAARNMMRLYRENKIVKIADGSVLVREMSDAQKNRNKGKKVVRKRKKEEEERNGEGPAPL
ES (SEQ ID NO: 125)
>3300017971|Ga0180438_10000124_114
[aquatic-non marine saline and alkaline-hypersaline lake sediment]
MGAARRRNPKVAAARKGKPPPKATGNCRNYRYGAHEPIANLDKVLDEMRGAHDLRNVLTCINRARSEMITAAL
GEHQSYKKATADLAALHQRRDKLEAQIRQQNSASRKRLGRHSPLSSELDTVRKRIDEGRTALKKLRRKLLKKD
PALKAVVEAADDMAKRETTRAEDACGLYWCTRNEQTGKRAKLRRFKKWRDSEATISVQIPGGLTVEQLLGGEN
NQARLELRPEGVWVQGARKRKVEPAEAARNKLRLDEDGYPMRKLGTAILHLRCMSDEDGKPIWAEVPITYHRE
IPADAKIKRCYLHRFRVGNRYHWSVRFSLERGKKGDDSWLHPRVATTGTAAIDIGWRWFPDRLRVAVWAGSDG
AEGELCLPKWWLDEMYSVRLDQRERDVLFNEIVSLVLPWFRSRRGELSDYVVQAIKTMHSWRDKGRLAALSMR
WRDDLAADPGANPAHVAMSIRLEEWRKRDKHIWCEEVNLRSQLQGSRKDLYRRFAAMLTSRYGRIVVEEFDLS
AVQKLPPASIDDGTYSRVKRHKGDAACSHLVGALKDAARQLDKKNPKWTTKRCHVCGKTERKWENPGELEHTC
KHCGVLWDRDVNAARNILAASGVAVDWTRPPLAPAARMTYPQVENREMRRSRRRKEALETTRASGDRQTA
(SEQ ID NO: 127)
>3300017971|Ga0180438_10000195_144
[aquatic-non marine saline and alkaline-hypersaline lake sediment]
MTKTYVYGLPLGPTVNADLVEEQMRLAHKYRNALIEIERERREKVREVYDERDLALEGLVEEDKVAKSELKRA
TEDLKRQRAKTRSRSDTAEQRARVKEARKAAQEVAKRLSEARKELKLDEELQKRLSEANLTASEKSQAAQQGF
SREGLFWGTYLQVDNAMEDSRRDLKMWDEHGQPLDPKFLQWRGDGTVAVQLQGDKHPVEKIFSGEDTFLQVDM
EPPPEGVVSKTRRKKRRGVMRLRVGSTKSRGPVWAEFPIIMHRPLPQGVRIKWAVVKRRMISDRPRWTVHFSL
GLPAEYQHEEFGSGRGAVAVDIGWRKRGEDQIRVAYLVDGDEYAAYLRDRQDPLGRGDELLMEPEVVRGFDKV
ESLQSIRALNQNEMQKSLKGWIKSNKKNLPEWFREDVRYLHSWKSPKRYAGLLRKWGEKRWDGDGEGFQILKD
WLSGTYEESLGRRDGGDRHLWQWKESQEQKSLRRRKDHYRRVAAKLARKYKVLVIEDFKLTETQKHEPPESEK
VEIQAARNQQKEAACYELRMMFVQAFLARGGTVVWVDARMTTQRCFECGCLEPWDAIPEVDHVCVECGAKWDQ
DANAARNIMRLYRNDETLKMIDGSVPVEPKMSRRQKGRKKGKKIVQQRKSQEAAQPSV (SEQ ID NO:
124)
>3300017971|Ga0180438_10013386_7
[aquatic-non marine saline and alkaline-hypersaline lake sediment]
MRVYKYGLLRPTTNADLVHEQIKIGHKYRNKLIELEIKRRDLIRAEVAKSSVVEDDFTDAKLAVEKFKHLDKL
LKQKNAQHRSKRHNNPDLKKDHTKARKEKTKAIKKLEETRRKVLKKCKETIKVFNDQYIEEEKKVRSECAPFW
GTYQVIEDAMKRSRKSLPLWDGLESNNPKFRRFNGIGRVSIQLQKDVIDKNNGMNVDLVFGTTDIRLQVAPVP
EEAWYSPIRSVRRKKSRTVLKMRIGSEGRAPIWAEWPMIMHRPLPDNGRIKRVTVNFRKIGPREEWTADFFIN
DSATLHEQYEVSGAIGLDVGWRLMDDGSLRVAFWEDDEGEKGEFRLSPTLMGAFKKADDLRSIRDKNRDEIKE
FLIQHFSKNPMPSWMLDFVKGKEDSKRPTNKQACVYLSKWKSIAKLTKLVQTWKEKGITKRHQKAYNRFEDWR
YHDFHLWQWETSQRKKAERRRKDNYRVLASKLSKQYHTLVLENFDLRKVARKKAADDDSLDIKAANHNRFVAN
ISELRLVLRNAFEKCGEIELVKAVNTTKICFWCGFINNFDQAKNLIHQCYSCGVVWDQDDNASTNIRRRRKQG
(SEQ ID NO: 126)
>3300017971|Ga0180438_10021273_1
[aquatic-non marine saline and alkaline-hypersaline lake sediment]
MPRNPKKKMDGVGRNYKYGAYAPLTNEDEVRWQMVLGHRYRNRLVEVELDIRAKRDAIIQEVAPGLLALEDEI
NKMGEIIALHEKAQKEQNKKQRGRDVHPGVANLLRDLKAEKKGLVGKRKALKAELFASDRWKQDGGDHLNQQR
KEGRSNAYSEYKDEGLWWGVRSKILRESGSFISGAPPKFRGWHKSVRSTRFVVQTQGGLTEEELLSGRNTTAR
LTLFPDGVWAEGKRRPKRMGDAILDLRIGSDEHRKPIWTSIPISYDRHLPAEAKIKWIYLFKRLLVDKEKWEV
VFALECPAAADYDAIRRRGGDKKRTNRNRKGIRLRKYAQSGVVAIDVGWRKFEDYLLVGTCAASDGREWELRL
DGNWLGQLRRVEGMQSYRDVLLNEQVKWLHPWLKSRKGSLPELLLPPSRNLEKWGQRSVARLVKQWMRERPIG
TLDEQRALARLDEWLSRENHVWHFQANLQHQLLLYRREEYRVWARRIGEVYRCVVLEKLNYGDWHKKPPVERG
GSVKADMAKKYLRDAGLSHLKNALKRGVLQVADVPHEGTTVNCHACGHADVWEDPAAKDHVCETCGLRWDRDV
NAARNILAASGVTVAWEREPLAPTEAWTACSKSGLNRAQRRAISSSLAIDSEIALAVGGSE (SEQ ID NO:
131)
>3300017971|Ga0180438_10044179_5
[aquatic-non marine saline and alkaline-hypersaline lake sediment]
MIVYQYGLRAPTSQIELIHDQLWLSHRYRNTLVEIERGRRAAVRRLNSTVGNVPLLEQQTKEAGERVSEASKA
VKQYRSKNRTRKVPEWMRTELDAARLEKKDVATKLREVRKQLRTPEIQAEMDRINGLAGELRRSARAHCGLYW
GSYLLVEDEMASSSKSPLYDKENPNEPNDPGFVRWHGEGHLGVQIQGGMPTGLVQFHSTLLQIKKVDPVEGKL
GKSHYLLRMRVGSNGRKPIWGEWPMVMHRPLDPGQIKGAAVSCRRIGLRWQWTVEITVDKESGCRPRPCGYGQ
VAVNFGWRKVDGGIRVAYAVDYEGNEQELVLPDGEAEGIVRPSRVRERLTDEQRAIQKRDGLIYGKACRLSDD
GKSYEAEKVLSGRPDLLSRLSSRVRPARKPPILPALRKSDELRSIRDQRFGHTLQSLIKWLKTIEVPCWLKDR
TSHIHKWKSQNRLRKLIGYWRSNRFDGDETMFQSLEVWNHRDEHLLSWEDSQRKKSQRRRRDLYRVWAAKLAD
RYYTIVLNSHDMAETARKPKVEATDDIPLSRSNRQLVSPSELKEALINAKRSREGQTVENPAQKVTHTCHNCE
TEQDFDAASSIEHTCLACGETWDQDRNAAINSLRWFVERPSDAKILGTARKIKNLDENGVEKETRRQRISRLK
REKDARMKALANDAASS (SEQ ID NO: 132)
>3300017971|Ga0180438_10056790_2
[aquatic-non marine saline and alkaline-hypersaline lake sediment]
MSRFHKDRLKVDAKIFSFNASEPMEGLEVIRSEMKLAHDYYNKLVELERARRSEIEEEQLRRFPELLRIEEEI
AVAEDSLVDLVRETKRRNSSRRSAKLPKEDRERIKIARGVLRELCKRRSEMKKGLRENADYQEAEKGITKKAK
GAAKEARHESGCFWPNYLQVEVAVESAKKPRKRRKGQRPVRWTYRPRFKRWEGRGRVSMQLQKGLSPERLESG
ADTRLRLVRGRVTKPGPRRERKQGTAMLWIRVGSTKEPGKRAQPVWAKVPFYYGGKRDRELPPDCSIKWCWLL
VDKIGLKERWRVQFSIDAPLGTLKHVDRASDGTVAIDIGWRLMGDRLRCAIWSGSDGEEGEIALTGSWVRAYS
RERAMRSYRERLFNCVLKELCSWAKEQEVLPEPLAEARALHAWKKHGKLASLSLKWRGKRDFRERSEKAASYL
REGGVVDLSGASEDDVLALLEGWRKRDKHVLEYESHLRDKLQATRLDLYRVCVANLRRRYKTCVLEEDVEDDE
RTKLMDLVKWHLLPDVIEAGDPGEEEQRRASKRGLRPACLFKLRAILKENMEIVGVPSEFTTKRCWSCGSVEE
WDQASEVEHTCENCGETWDQDVNAARNLLVASGVEATFFRPALAPAEVWTCGLRGTFPEPV (SEQ ID NO:
133)
>3300017971|Ga0180438_10072596_2
[aquatic-non marine saline and alkaline-hypersaline lake sediment]
MFGHDSLPSRIYRYGAKAPTVGAENVDRQMSLGHRYYNTLVEIERRRREKAAALVARVSPALASLEQRREALT
AAIAERREAVKKSNQEVRKKQATKDERDAIAALTAERKEVNVLYRDAKDLAYNSPEAAAGLAAIDQQADMEAK
TARAESGLYWGTYLQVEQSLPRKGPPPKFHRWMGDGKIAVQIQGGMTLEEAFAGRDQRFRLEPIPDNAWDKGN
RKHRRTRAWIRVASDGRDPVWAVVPVVLHRPIPDDAQIKWVYLLRRRVGCNNNWSLCLVISRQAWQRHDLAGD
GAVGINLGWRKVEGGIRVATWVGDDDESDTLVISERDAGRWQKAKDLRSIRDGRFNAIQEALVDWLGSHAVPE
WFSERTATIKQWRSQARLAALVIAWRSQRFEGDEGIFPAMEAWRKKDKHLYEWEANQRRKAVAWRNDLYRCFA
AKLSQRYETAVLGKTDWKTIGRRPSPENPEHASGGENRTLASPGILQRMIVERVARVELADAKHITQRCHACG
KLASFDARTNIFTTCRHCAETWDQDENAARNLLLSASGPVAQKTP (SEQ ID NO: 134)
>3300017987|Ga0180431_10022214_3
[aquatic-non marine saline and alkaline-hypersaline lake sediment]
MRVIVYEYGLRQPTSGIDDIDDQIHRAHRYYNKLIEIERWRRAQVKKAQLQVPEVANTKKVVEALREDLEALR
TQHKRAKSHDGKTHPPRAGAIKDTTAALKAARQGYRQAKKDAADILKPLYKKVDEERNALVRQARGESGVYWG
TYLCIEQFASQAAQTAKRESPDFRRWTGDGMLAVQIQNGLDAGALFGDDTRVQVAPIDSKAWDKSISRGKRKR
MQYTTLRLRVGSTGPGNREPVWAEWPLFMHRELPADASIKWVRVIRRRWDQRWKYRWVVQFTVEVPEAPGWQG
EGTRKGMVAINLGWRKLATDALRVATWVDTEGNVGELQLPVSFRQRLEKANSIRSIRDRKLDELKAAIVPLLP
ECSRWKSPKRFEGLLRQDDLPDGVRDLVNKWAYRDRHLWWFERGCRQGALRYRREIYRLFALEMAKKYPLVIV
EDYDLRPIVTDENRIKLPSHQRVEGSPSEARHVLLASVSRLGGMVIDGKSKLATQECHLCGYGKEKDERWDAS
PKIEHTCVGCGENWDQDVNNARVLLARAQVMLESGELLAQPKPKRSARFAKKHKKQNEAVL (SEQ ID NO:
135)
>3300017987|Ga0180431_10041976_5
[aquatic-non marine saline and alkaline-hypersaline lake sediment]
MFGHDSLPSRIYRYGAKAPTVGAENVDRQMSLGHRYYNTLVEIERRRREKAAALVARVSPALASLEQRREALT
AAIAERREAVKKTNQEVRKKQATKDERDAIAALTAERKEVNVLYRDAKDLAYNSPEAAAGLAAIDQQADMEAK
TARAESGLYWGTYLQVEQSLPRKGPPPKFHRWMGDGKIAVQIQGGMTLEEAFAGRDQRFRLEPIPDNAWDKGN
RKHRRTRAWIRVASDGRDPVWAVVPVVLHRPIPDDAQIKWVYLLRRRVGCNNNWSLCLVISRQAWQRHDLAGD
GAVGINLGWRKVEGGIRVATWVGDDDESGTLVISERDAGRWQKAKDLRSIRDGRFNAIQEALVDWLGSHAVPE
WFSERTATIKQWRSQARLAALVIAWRSQRFEGDEGIFPAMEAWRKKDKHLYEWEANQRRKAVAWRNDLYRCFA
AKLSQRYETAVLGKTDWKTIGRRPSPENPEHASGGENRTLASPGILQRMIVERVARVELADAKHITQRCHACG
KLASFDARTNIFTTCRHCAETWDQDENAARNLLLSASGPAAQKTP (SEQ ID NO: 136)
>3300017989|Ga0180432_10002388_5
[aquatic-non marine saline and alkaline-hypersaline lake sediment]
MRVIVYEYGLRQPTSGIDDIDDQIHRAHRYYNKLIEIERWRRAQVKKAQLQVPEVANTKKVVEALREDLEALR
TQHKRAKSHDGKTHPPRAGAIKDTTAALKAARQGYRQAKKDAADILKPLYKKVDEERNALVRQARGESGVYWG
TYLCIEQFASQAAQTAKRESPDFRRWTGDGMLAVQIQNGLDAGALFGDDTRVQVAPIDSKAWDKSISRGKRKR
MQYTTLRLRVGSTGPGNREPVWAEWPLFMHRELPADASIKWVRVIRRRWDQRWKYRWVVQFTVEVPEAPGWQG
EGTRKGMVAINLGWRKLATDALRVATWVDTEGNVGELQLPVSFRQRLEKANSIRSIRDRKLDELKAAIVPLLP
ECSRWKSPKRFEGLLRQDDLPDGVRDLVNKWAYRDRHLWWFERGCRQGALRYRREIYRLFALEMAKKYPLVIV
EDYDLRPIVTDENRIKLPSHQRVEGSPSEARHVLLASVSRLGGMVIDGKSKLATQECHLCGYGKEKDERWDAS
PKIEHTCVGCGENWDQDVNNARVLLARAQVMLESGELLAQPKPKRSARFAKKHKKQNEAVL (SEQ ID NO:
135)
>3300017989|Ga0180432_10021155_3
[aquatic-non marine saline and alkaline-hypersaline lake sediment]
MYRYGLLPPSSGAELVDEQMWLVHRYSNELVEIERARRKGFHAALAVVPEVAEALRVEEEALARYHVLRDSDS
DDRAAEFRKKGKRRRKSSPAVADALAALKAATDAVEDVRAAAVKAIGRDSKKKKTAKKKKKKKTATELVKMTP
AEVASVTEAINENDAVHGDAAKRKRAEFIAQGLYWGNYQVAEASIPRKGPPPKFRRWEGRGHIAVQIQGGMTY
AELLSCNHTMARLEIRDDWGSNRRTSRHGLLWIRVGSKGKGGREPVWATFPVCWHRHLPEGARIKRIDVTRRI
QGVRAVWAVCVTVQTPGASLTKQALVKPVTKALPKAVGLDVGWRSTDDGGIRVAVLYDGDRHYEVALPHWFAE
GDRLVSDLQSIRRCRFNAVKDQLLAALREGKHKEQAETFATLASWDSQARLARAVREWEGCPAYLTEWRAKER
HLYQWERDAKRYLVEWRKNWYCHWVAWISQRYKNVVIEKFDIAKIKKKAEAGEDKEEATGPHSLAAPGELRRI
LLSTCSREGVQVHLAPAGNTTRKCSVCGKLRRKKKGEGVALMQECSGCGRVMDQDANASRNLYGFASAGVIPE
TPVAFAVPEAAWYGRFSLTPKKIQSRVARLQAALETSPPDSDGKGG (SEQ ID NO: 137)
>3300017989|Ga0180432_10021155_5
[aquatic-non marine saline and alkaline-hypersaline lake sediment]
MAFHHSTQPTTSRVYRYGLLPPSSGAELVDEQMWLVHRYSNELVEIERARRKGFHAALAVVPEVAEALRVEEE
ALARYHVLRDSDSDDRAAEFRKKGKRRRKSSPAVADALAALKAATDAVEDVRAAAVKAIGRDSKKKKTAKKKK
KKKTATELVKMTPAEVASVTEAINENDAVHGDAAKRKRAEFIAQGLYWGNYQVAEASIPRKGPPPKFRRWEGR
GHIAVQIQGGMTYAELLSCNHTMARLEIRDDWGSNRRTSRHGLLWIRVGSKGKGGREPVWATFPVCWHRHLPE
GARIKRIDVTRRIQGVRAVWAVCVTVQTPGASLTKQALVKPVTKALPKAVGLDVGWRSTDDGGIRVAVLYDGD
RHYEVALPHWFAEGDRLVSDLQSIRRCRFNAVKDQLLAALREGKHKEQAETFATLASWDSQARLARAVREWEG
CPAYLTEWRAKERHLYQWERDAKRYLVEWRKNWYCHWVAWISQRYKNVVIEKFDIAKIKKKAEAGEDKEEATG
PHSLAAPGELRRILLSTCSREGVQVHLAPAGNTTRKCSVCGKLRRKKKGEGVALMQECSGCGRVMDQDANASR
NLYGFASAGVIPETPVAFAVPEAAWYGRFSLTPKKIQSRVARLQAALETSPPDSDGKGG (SEQ ID NO:
138)
>3300017989|Ga0180432_10043261_1
[aquatic-non marine saline and alkaline-hypersaline lake sediment]
MSTKVYKFRLYAPILNGDLVEEQLKLANAYRNKLIELERDRRVVARELNAERRSVLGEYIDAAEELKTRLKRE
VNRLKAMKAMKARGARKSPELKDQEKLVTQIRQERKAAVEDLKAREANLKTTSELQAKYDKLWEDLTNKTKEE
RNLNGLYWGTGGFQEQAMQKSSETLHLGKDPRFKRWDGCGTVAVQVQKPLQMPLKDFFHGKSTLINFIMDDEG
ASGTKRHGVVQLRVGSDRKKPIWAEWPLVMHREMHERAVITGAQIHKTRTADKFKYHLCVTAKLPDDVRKERC
GDGVVALDIGWRKLLDGNLRVAYWKDREGNGGQLVLDPAVLSGLGKDASLQAICRGLLNKLYKAFYTWLSSVA
NLPENFQQIYEEMTAEKAYWKEFRALQKIVREARAGGLPELDALEEKLAEMKARQKEVRTWKVQGKFSGLLED
WRNNRWDGDNAGFTMLDDWWRGTYNPESGHREGGCKHLWQWRSNQREKSQRRRKHQYRNLGAEFSRKAGVLVL
ENFDLTDMQRDAEPEEKKKNPEAKLNQRYAACYELREAFIQAFQSRGGRVVKIDPQMTTQICARCGCDTRWDA
ALEIEHTCERCGATWDQDENAADNLLKLYEGGGSIQEVTVVKKDPRWKRLKAEKAAKLEDRGGARKD (SEQ
ID NO: 139)
>3300017989|Ga0180432_10045094_6
[aquatic-non marine saline and alkaline-hypersaline lake sediment]
MVTEYTTKVYTCGLRPPAENADLVSEQIRLGHRYYNRLIEIEHEKRQRDHEIVGAHGDADALQAAIDEQVVVV
EQVVARIRRWRIANGKKVASKDLRMELAAAKKSLKAARAELRELRRVIKQDPEIAASRVALWAEDSAARKRAR
AECGIPHGTYIQVEQAVEAACKAPMAPGCETPWWELPRFKRWKGEGCVGLQLQQRDGEYMDTDALFGRSDPRL
QIDPVPSTAWDRRRSREQRTVVRMRIGSECRRCGALCTSIHCPEGGDGGAAYRSPVWASWPMILHRPLPEGAL
IKWAKVKRERIVGKARWRWSLHLTIDEPEQEPRCGEGTVAVDVGWRKTETGMRVGYWQDDSGDHNSINIDHEI
LDRLRKVDELESIRKRNMNAAKSQLRAWLATWEEVPDWMREASRHMHAWRSQNRLAGLALHWRQNRWEGDNPG
YEDLEDWRKQDKHLWAWQDNLRGKVLRRRREVYRVAAARLAERYDTVVLTDFDLRDTQRHPSDTSTREEIDAV
KWQQKAAACSVLRGCIRNAFTSRGGRIVEVEAKLMSRTCHGCGHDGEWAKPEELEHTCQGCGETWDRDVNSTT
NMLRAARERSDDDDGRPKKRAAKWAKRHGRSKNENDDDGTSRNAGDKVA (SEQ ID NO: 140)
>3300017991|Ga0180434_10002646_1
[aquatic-non marine saline and alkaline-hypersaline lake sediment]
MRVIVYEYGLRQPTSGIDDIDDQIHRAHRYYNKLIEIERWRRAQVKKAQLQVPEVANTKKVVEALREDLEALR
TQHKRAKSHDGKTHPPRAGAIKDTTAALKAARQGYRQAKKDAADILKPLYKKVDEERNALVRQARGESGVYWG
TYLCIEQFASQAAQTAKRESPDFRRWTGDGMLAVQIQNGLDAGALFGDDTRVQVAPIDSKAWDKSISRGKRKR
MQYTTLRLRVGSTGPGNREPVWAEWPLFMHRELPADASIKWVRVIRRRWDQRWKYRWVVQFTVEVPEAPGWQG
EGTRKGMVAINLGWRKLATDALRVATWVDTEGNVGELQLPVSFRQRLEKANSIRSIRDRKLDELKAAIVPLLP
ECSRWKSPKRFEGLLRQDDLPDGVRDLVNKWAYRDRHLWWFERGCRQGALRYRREIYRLFALEMAKKYPLVIV
EDYDLRPIVTDENRIKLPSHQRVEGSPSEARHVLLASVSRLGGMVIDGKSKLATQECHLCGYGKEKDERWDAS
PKIEHTCVGCGENWDQDVNNARVLLARAQVMLESGELLAQPKPKRSARFAKKHKKQNEAVL (SEQ ID NO:
135)
>3300017991|Ga0180434_10013735_9
[aquatic-non marine saline and alkaline-hypersaline lake sediment]
MFGHASDPSVIYRYGALPPTHNLDAAFEQLRAAHRYRNKLVEIERDRRDKTAAVVSAASPDLAGLESQYAELG
ERTAAAAKQIKATNQRARAQRATPEQKAVLRKLRAECKDVYSRLKEAKALAYKSLEARTALDQADAAALNAAK
KARAECECYWGTYLQVEQGLSGIRKGAPPRFLRWTGNGKLAVQIQGGMSREEAEHGDGRLRIATTERRGKATN
VYLRIGTNEDRSPIWAVVPVIFHRPIPDDARIKWVYLTARRVACHTRWHVCFVLSRAEGWRKPDLATSGTVAV
DLGWRLLDHGLRVGYWRGSDGGSEEILLPTRDVARWQKADDLRAIRGERFNGVVDWLAKWLAGRDLPDWLIER
TRTLRQWRSAARLASVVIHWRENRFAGDKDGFAAVEAWRKKDKHLYEWEANQRRKAVAWRDDLYRRVAADLSR
RYKTAIVEDCNWRDVGRKPDVGENNDSGAAARQRTIAAPGRLKQLLVERFAETVKAEAAYTTQRCHACGELAH
VETRTSVWVTCQQCGAAWDQDDNACRNMLDMVAKGPVT (SEQ ID NO: 141)
>3300017992|Ga0180435_10018121_11
[aquatic-non marine saline and alkaline-hypersaline lake sediment]
MTKTYVYGLPLGPTVNADLVEEQMRLAHKYRNALIEIERERREKVREVYDERDLALEGLVEEDKVAKSELKRA
TEDLKRQRAKTRSRSDTAEQRERVKEVRKAAQEVAKRLSEARKELKLDEDLQERLSRANLTASEKSQAAQQGF
SREGLFWGTYLQVDNAMEDSRRDLKMWDEHGQPLDPKFLQWRGDGTVAVQLQGDKHPVEKIFSGEDTFLQVDM
EPPPEGVVSKTRRKKRRGVMKIRIGSTESRGPVWAEFPIIMHRPLPQGVRIKWAVVKRRMISERPRWTVHFSL
GLPAEYQHEEFGSGRGAVAVDIGWRKRGEDQIRVAYLVDGDEYAAYLRDRQDPLGRGDELLMEPEVVRGFDKV
ESLQSIRALNQNEMQKSLKGWIKSNKKNLPEWFREDVRYLHSWKSPKRYAGLLRKWGEKRWDGDGEGFQILKD
WLSGTYEESLGRRDGGDRHLWQWKESQEQKSLRRRKDHYRRVAAKLARKYKVLVIEDFKLTETQKHEPPESEK
VEIQAARNQQKEAACYELRMMFVQAFLARGGTVVWVDARMTTQRCFECGCLEPWDAIPEVDHVCVECGAKWDQ
DANAARNIMRLYRNDETLKMIDGSVPVEPKMSRRQKGRKKGKKIVQQRKSQEAAQPSV (SEQ ID NO:
142)
>3300018065|Ga0180430_10011859_2
[aquatic-non marine saline and alkaline-hypersaline lake sediment]
MFGHKADPSLIYRYGAKTPIEHCDVVDAQIRAAHRYYNQLVEIELRRREQATELVRSLSPELDTLTEWREELS
ETIDSVRAEIKAANQRARRKTTTKAQRDQVKALRKQRKAVTELWREAKAAAYDSPDAKAGLAAIDEAANESRR
QARAACGVYWGTYLAIEQSIPKTSAPPTFHRWTGDGRVVVQLQGGMSAAEAFACRDNRFRIEPVPEEAWDRGQ
PKRLQRTRAWVRVDSDGRDPVWAVVPITLHRPFPEDCRIKWVYLIRRKVASKDKWSLCLVLSRVEGWQKTDLG
ASGSVGIDLGWRLVAEGLRVAYWAGDDGESGSVVLPMRDVGRWQKARDLQSIRATNFDAIVLRLAGWLAGREL
PDWLTERTKTLRQWRSQGRLAAVVIQWRAERFDGDAEIFAEVEAWRKQDKHLWEWEHNQRRKAIAWRENVYRQ
FAAMLSRRYRVVCLEATDWRHFMRKVAAEEDGQGGAGAQRYLRIASPGQLSRLLAERFAEVVRVDPKHTTQRC
HVCGELAQFDAATSLHTKCRHCGAEWDQDYNAARNLLGAASGPVPQETP (SEQ ID NO: 143)
>3300018065|Ga0180430_10038979_3
[aquatic-non marine saline and alkaline-hypersaline lake sediment]
MFGNKALPSVIYKYGARRPVTNADEVDRQVRDAHRYRNKLVEIERDRRSCVNAKLMQLAPRLLSLETEIERLD
NLIAEKRSEIKRANATRRRRDVTPEQRAELRQWQADRKALRTELKERKADAFADPRIRTALAKVDAEALAASK
AARAASGVYWGTYCQVEQSLSGMRSGAPPRFLRFDGTGKLAVQLQGGLSVAKAFAGEDRRLIIEPVPPKAYLP
GEPKALQRTRVWLRIGSDGREPIWTIVPITLHRPLPDDASIKWVYLTRRRVATKDRWSVCFVLARESGWQKPG
LARNGSVGVNLGWRVMDDGVERGLRVARWVGDDGTEGELRLPMPDVERWKKTEDLQAIRDQRFNAAVSLLADW
LADPGCLLPDWLVERTATLRQWRSAARLAAIAIQWRGERFEGDDTAFATLEAWRKKDKHLYEWQANQLRKAIA
WREDLYRNLAATLSRRYHTVCLANTDWRDLARRPTAEQAETDAGARRYQRVASPGALGRLLRERFAETVTVDS
RHITQRCHACGEVNQFDAAAHVRATCRHCGAEWDQDINAARNILRAASGPVACETP (SEQ ID NO: 144)
>3300018080|Ga0180433_10006034_17
[aquatic-non marine saline and alkaline-hypersaline lake sediment]
MRLANRYYNCLVVIERERRQAVRDALQECDQRHGIDALQDVVDTLKTQRDEAREEIKRARSKTRSRSDTEDQR
KRVKDLTVQIKEACELVKRARRDIRDDEQAKEQMKAADNIARTKTREARAICGVFWGTYLTIEAAIDAARKAP
LWQYGKPNDPRFRRFGGRGSVSMQLQGGLAASDVFGDDRRLQIELSPQRKSNSNRSKIRRYGVIRLRVGSSKR
DPIWAEWPLLMHRQLPDLSTIKWARIVCDRVANEERWSLQLTIDIPEPVKVSDERKGTVAINPGWRLLDYGVR
VGYIVDDCNETDEIVIDPGVLSGLRKVEDLRSIRDRTQNTMMEEFLPWLRSHKNILPAWLTERTKTIGQWKAA
ARFAALAHVWSVSRFGGDVLGYELLEQWRKQDLHLWQWESFQRRKSIGRRRNQYRRLAKQLAHRYHTLVLDTT
NLAEIQRHKSTESEEIEIPAARLQQRDAATAELRSYLAEAFHATGGVVVKVNHKRATRRCHVCGHEGPWNQCD
EVVHKCESCGSSWDQDENNCRNLLERLGDGDKITTKRQAKWDRLGRHNKTARKLDDNDVEIQTN (SEQ ID
NO: 145)
>3300018080|Ga0180433_10006034_18
[aquatic-non marine saline and alkaline-hypersaline lake sediment]
MPTKVYKYGVRPPTKNADIVHEQMRLANRYYNCLVVIERERRQAVRDALQECDQRHGIDALQDVVDTLKTQRD
EAREEIKRARSKTRSRSDTEDQRKRVKDLTVQIKEACELVKRARRDIRDDEQAKEQMKAADNIARTKTREARA
ICGVFWGTYLTIEAAIDAARKAPLWQYGKPNDPRFRRFGGRGSVSMQLQGGLAASDVFGDDRRLQIELSPQRK
SNSNRSKIRRYGVIRLRVGSSKRDPIWAEWPLLMHRQLPDLSTIKWARIVCDRVANEERWSLQLTIDIPEPVK
VSDERKGTVAINPGWRLLDYGVRVGYIVDDCNETDEIVIDPGVLSGLRKVEDLRSIRDRTQNTMMEEFLPWLR
SHKNILPAWLTERTKTIGQWKAAARFAALAHVWSVSRFGGDVLGYELLEQWRKQDLHLWQWESFQRRKSIGRR
RNQYRRLAKQLAHRYHTLVLDTTNLAEIQRHKSTESEEIEIPAARLQQRDAATAELRSYLAEAFHATGGVVVK
VNHKRATRRCHVCGHEGPWNQCDEVVHKCESCGSSWDQDENNCRNLLERLGDGDKITTKRQAKWDRLGRHNKT
ARKLDDNDVEIQTN (SEQ ID NO: 146)
>3300018080|Ga0180433_10012134_6
[aquatic-non marine saline and alkaline-hypersaline lake sediment]
MWLVHRYSNELVEIERARRKGFHAALAVVPEVAEALRVEEEALARYHVLRDSDSDDRAAEFRKKGKRRRKSSP
AVADALAALKAATDAVEDVRAAAVKAIGRDSKKKTAKKKKKKKTATELVKMTPAEVASVTEAINENDAVHGDA
AKRKRAEFIAQGLYWGNYQVAEASIPRKGPPPKFRRWEGRGHIAVQIQGGMTYAELLGCNHTMARLEIRDDWG
SNRRTSRHGLLWIRVGSKGKGGREPVWATFPVCWHRHLPEGARIKRIDVTRRIQGVRAVWAVCVTVQTPGASL
TKQALVKPTTEALPKAVGLDVGWRSTDDGGIRVAVLYDGDRHYEVALPHWFAEGDRLVSDLQSIRRCRFNAVK
DQLLAALREGKHKEQAETFATLASWDSQARLARAVREWEGCPAYLTEWRAKERHLYQWERDAKRYLVEWRKNW
YCHWVAWISQRYKNVVIEKFDIAKIKKKAEAGEDKEEATGPHSLAAPGELRRILLSTCSREGVQVHLAPAGNT
TRKCSVCGKLRRKKKGEGVALMQECPGCGRVMDQDANAARNLYGFASVGVIPETPVAFAVPEAAWYGRFSLTP
KKIQSRVARLQAALETSPPDSDGKGG (SEQ ID NO: 147)
>3300018080|Ga0180433_10012134_6
[aquatic-non marine saline and alkaline-hypersaline lake sediment]
MAFHRSTQPTTSRVYRYGLLPPSSGANLVDEQMWLVHRYSNELVEIERARRKGFHAALAVVPEVAEALRVEEE
ALARYHVLRDSDSDDRAAEFRKKGKRRRKSSPAVADALAALKAATDAVEDVRAAAVKAIGRDSKKKTAKKKKK
KKTATELVKMTPAEVASVTEAINENDAVHGDAAKRKRAEFIAQGLYWGNYQVAEASIPRKGPPPKFRRWEGRG
HIAVQIQGGMTYAELLGCNHTMARLEIRDDWGSNRRTSRHGLLWIRVGSKGKGGREPVWATFPVCWHRHLPEG
ARIKRIDVTRRIQGVRAVWAVCVTVQTPGASLTKQALVKPTTEALPKAVGLDVGWRSTDDGGIRVAVLYDGDR
HYEVALPHWFAEGDRLVSDLQSIRRCRFNAVKDQLLAALREGKHKEQAETFATLASWDSQARLARAVREWEGC
PAYLTEWRAKERHLYQWERDAKRYLVEWRKNWYCHWVAWISQRYKNVVIEKFDIAKIKKKAEAGEDKEEATGP
HSLAAPGELRRILLSTCSREGVQVHLAPAGNTTRKCSVCGKLRRKKKGEGVALMQECPGCGRVMDQDANAARN
LYGFASVGVIPETPVAFAVPEAAWYGRFSLTPKKIQSRVARLQAALETSPPDSDGKGG (SEQ ID NO:
148)
>3300018080|Ga0180433_10020043_6
[aquatic-non marine saline and alkaline-hypersaline lake sediment]
MRVYKYGLPWLLDEEEAPDGAKGGRMAVERQLRAAHVYQNKLIELIRARRLVHRDAVMGYGRVAELHKQVDDI
NELYQDARDDLKKTRQKERRRAESDRQKAMVAKLRELYKESLAQLYKERRKAFRDSAVKELCKEADESFYEQQ
RQERTRDLTDEERQRGWERPFWGTKQIVEASVKQAHESMPLWDGVRPNDPRFRSWDGSGILGVQNQRPLFSTL
NDEQQMDPAVQDIFGKDTSLRVDPVDPEAWHNPKRCERKRKSRTVLWMRVGSDENRQPVWACWRMIMHRPLPD
GAQIKRASVSKRIVGERQKWTVQIYVDDQGCKRAPSCGDGSVTIDLGWRQQQNGVRIATWLGSDGRQGKFKLP
QKVIERMFSERGIRKTRDENLDRMRPCLEAWIRNQKCLPEWLEKRTKMIGRWRSHARFRALAQYWRGCRFPGD
EEGYDMLEAWRYRDHHLWNYERGRSMKSRGWRDQLYCQFGAWLARQYGTVVWENFNIAKMAKRPKLGDDYENE
RARAMRHAVAVATFRDKVENAFDTRGGRSRYVSAVNTTRRCHVCGLVDAFDAASSVKRVPPCPGCGASWDQDE
NACVNMMETYDRGDSSSKPRKTNGARNGKKTNGNAVEGESHWARMKRLKREKDAHK (SEQ ID NO: 149)
>3300018080|Ga0180433_10021337_5
[aquatic-non marine saline and alkaline-hypersaline lake sediment]
MFGHASDPSVIYRYGALPPTHNLDAAFEQLRAAHRYRNKLVEIERDRRDKTAAVVSAASPDLAGLESQYAELG
ERTAAAAKQIKATNQRARAQRATPEQKAVLRKLRAECKDVYSRLKEAKALAYKSLEARTALDQADAAALNAAK
KARAECECYWGTYLQVEQGLSGIRKGAPPRFLRWTGNGKLAVQIQGGMSREEAEHGDGRLRIATTERRGKATN
VYLRIGTNEDRSPIWAVVPVIFHRPIPDDARIKWVYLTARRVACHTRWHVCFVLSRAEGWRKPDLATIGTVAV
DLGWRLLDHGLRVGYWRGSDGGSEEILLPTRDVARWQKADDLRAIRGERFNGVVDWLAKWLAGRDLPDWLIER
TRTLRQWRSAARLASVVIHWRENRFAGDKDGFAAVEAWRKKDKHLYEWEANQRRKAVAWRDDLYRRVAADLSR
RYKTAIVEDCNWRDVGRKPDVGENNDSGAAARQRTIAAPGRLKQLLVERFAETVKAEAAYTTQRCHACGELAH
VETRTSVWVTCQQCGAAWDQDDNACRNMLDMVAKGPVT (SEQ ID NO: 150)
>3300018080|Ga0180433_10021840_7
[aquatic-non marine saline and alkaline-hypersaline lake sediment]
MVDDQMRLGNRYYNRLIEIECARRDAIREAMADNDRRHGLSDAIARHARLDEQYNAAKEALKAKRSRARCRVD
TAPERAAVRDLRAQRSKAAAELKEARKGHRGDSTMHAAFDAANEEAKLQRRASRAICGVYWGTYLQIEAAVDQ
AAKETSLFFKGKPRDPRFRRWGGSVMVATQLQGGLLALSALACDDSRLQIEMAELGPGPHSRRQLKLRKGTLR
LRVGSDGRSPIWAEWPLQMHRPLPENGVIKWAKVIRRMVSDRDKWELQLTVEISPEQPCHGEGTVAVDLGWRR
KEDGTIRVGYVVDDCGLEEEIILDPGVVSGLRKSEDLRSIQDKAQAEMAARVIGWLKAQAELPPWLILATGFV
DKWKSARRWRRLASIWAEHPDVGSEALSVLSAWAADSLHLWRWEAHQRRKSCLRRKDQYRCLAKRLAAEYRHL
VLESKFLAKLQRHVEAEDEDVEIKAVRLQQRDAAGYELKQCLIYAFRRANGTAVEVDPAMTPQRCNACGFVGR
WDAAVEIDHTCEACGATWDQDANACRNLLERERPGDDSGQEAKRQGKWARKKAAKRTARKTVPSGAESFEAGV
(SEQ ID NO: 151)
>3300018080|Ga0180433_10021840_7
[aquatic-non marine saline and alkaline-hypersaline lake sediment]
MIRVYRYGLRRPTTNADLVDDQMRLGNRYYNRLIEIECARRDAIREAMADNDRRHGLSDAIARHARLDEQYNA
AKEALKAKRSRARCRVDTAPERAAVRDLRAQRSKAAAELKEARKGHRGDSTMHAAFDAANEEAKLQRRASRAI
CGVYWGTYLQIEAAVDQAAKETSLFFKGKPRDPRFRRWGGSVMVATQLQGGLLALSALACDDSRLQIEMAELG
PGPHSRRQLKLRKGTLRLRVGSDGRSPIWAEWPLQMHRPLPENGVIKWAKVIRRMVSDRDKWELQLTVEISPE
QPCHGEGTVAVDLGWRRKEDGTIRVGYVVDDCGLEEEIILDPGVVSGLRKSEDLRSIQDKAQAEMAARVIGWL
KAQAELPPWLILATGFVDKWKSARRWRRLASIWAEHPDVGSEALSVLSAWAADSLHLWRWEAHQRRKSCLRRK
DQYRCLAKRLAAEYRHLVLESKFLAKLQRHVEAEDEDVEIKAVRLQQRDAAGYELKQCLIYAFRRANGTAVEV
DPAMTPQRCNACGFVGRWDAAVEIDHTCEACGATWDQDANACRNLLERERPGDDSGQEAKRQGKWARKKAAKR
TARKTVPSGAESFEAGV (SEQ ID NO: 152)
>3300001256|JGI12210J13797_10495608_9
[aquatic-non marine saline and alkaline-hypersaline mat]
MARKTSKTPTKIYSYGARLDEGDMATARHTLWMAQDYYDDRVRIEQARRLAYREARAQVCPWLRDAEVKIDLL
ELDLEKVREELKSKRKSEFRRATGTDLATMAKELLALLKPMRKEARAQRKAASADPGVQAEGQRLDLLAKTLL
KSCSKYYGAKGLDWRTRGRVDDETRQAFADTASRPWRLGQCKKGFCGRVGGQVLAARGVFLDTDRLFSDWSTV
VQIDPLPDHTWDTRSGRRKAITAGRISVGSLGPRRPVWLRFTAVIHRRPPRGIIKNAWLFFRERGGRVEAKFQ
FTLESEEFLRASPEPVHACAIAMTPSRNLSAAVAVGTDGTIQYLSLPEKVWDRFEFAESIRSAADLAFDEVRP
SLVEAGLIPHQSRSRRRARRAAMGYAREALDAKAVWSTWRDERLGDGVDLWDSPDVVTDWAGRKGHDPLAVLC
LVWSKKDGHLDRYEDNVRHKARGYRSETYRTWVSALASKYRLFVDPYDAKYLKHAPNPEDDPRIANIERARSR
MSLYSLMTTLREKGATEVEADAVEPGAAAHVMRAASVLAKAGEDTTKAVAKIEESRRMVEMARQLDAAE
(SEQ ID NO: 153)
>3300001256|JGI12210J13797_10495610_14
[aquatic-non marine saline and alkaline-hypersaline mat]
MARKTSKTPTKIYSYGARLDEGDMATARHTLWMAQDYYDDRVRIEQARRLAYREARAQVCPWLRDAEVKIDLL
ELDLEKVREELKSKRKSEFRRATGTDLATMAKELLALLKPMRKEARAQRKAASADPGVQAEGQRLDLLAKTLL
KSCSKYYGAKGLDWRTRGRVDDETRQAFADTASRPWRLGQCKKGFCGRVGGQVLAARGVFLDTDRLFSDWSTV
VQIDPLPDHTWDTRSGRRKAITAGRISVGSLGPRRPVWLRFTAVIHRRPPRGIIKNAWLFFRERGGRVEAKFQ
FTLESEEFLRASPEPVHACAIAMTPSRNLSAAVAVGTDGTIQYLSLPEKVWDRFEFAESIRSAADLAFDEVRP
SLVEAGLIPHQSRSRRRARRAAMGYAREALDAKAVWSTWRDERLGDGVDLWDSPDVVTDWAGRKGHDPLAVLC
LVWSKKDGHLDRYEDNVRHKARGYRSETYRTWVSALASKYRLFVDPYDAKYLKHAPNPEDDPRIANIERARSR
MSLYSLMTTLREKGATEVEADAVEPGAAAHVMRAASVLAKAGEDTTKAVAKIEESRRMVEMARQLDAAE
(SEQ ID NO: 153)
>3300005917|Ga0075115_10002831_4
[aquatic-non marine saline and alkaline-saline lake]
MAKVAK GEKMTFVYEYGLRPPSLNADIVDNQLILGNRYRNALVSIERKRRDAIRGWINKPVEKESIAYSEATE
SFSIAETAMKKQRASTRSRSDTADQRDEVKDLRKKKKDALSVLKAARVKAKKEELFKAEMDDVENQSKQEIKD
ARSECGLYWGTYLVIEAAMAASRKKMPLWDKHFEPANPRYQRWQGTGTVAVQVQKSQQTTADHTMECTGRLIQ
LDMEKISDEERSKMSKRRQKRCFGTLRMRVGSEGRDPIWAEWPIIMHRPLPSDSTITEVRVIKKKISDHGKWN
VHITIKTPDGYYKQHNGVDDKCGSGPLALDLGWRLLGTGELRVAYTTDEDGTEEEIRLDHNILTGLKKSDELQ
GLCDDLQNKMKSTLNEWKKTHHLPDWFAEESSHIHAWKKTHKFVRLLHSWSKNRWDGDSEGFDILNDWHFGAY
KEDLGRRDGGSRHLWQWREHQRKKSLLRRKDQYRVLAARLSRKYSVLILEDLNLSKLQEHNKSEDDAVEIKEA
RWQQRAAACYELRECLKQAFLSRGGRVLKVKAAMTTQRCFCCGCEKKWDPIPSINHTCDQCGKTWDQDANAAK
NIMLLYDKKEFSEQSSGVKKEDAESLSKWGKIGRHKKTSLKLTDNQPEQLN (SEQ ID NO: 154)
>3300005918|Ga0075116_10002890_7
[aquatic-non marine saline and alkaline-saline lake]
MAKVAKGEKMTFVYEYGLRPPSLNADIVDNQLILGNRYRNALVSIERKRRDAIRGWINKPVEKESIAYSEATE
SFSIAETAMKKQRASTRSRSDTADQRDEVKDLRKKKKDALSVLKAARVKAKKEELFKAEMDDVENQSKQEIKD
ARSECGLYWGTYLVIEAAMAASRKKMPLWDKHFEPANPRYQRWQGTGTVAVQVQKSQQTTADHTMECTGRLIQ
LDMEKISDEERSKMSKRRQKRCFGTLRMRVGSEGRDPIWAEWPIIMHRPLPSDSTITEVRVIKKKISDHDKWN
VHITIKTPDGYYKQHNGVDDKCGSGPLALDLGWRLLGTGELRVAYTTDEDGTEEEIRLDHNILTGLKKSDELQ
GLCDDLQNKMKSTLNEWKKTHHLPDWFAEESSHIHAWKKTHKFVRLLHSWSKNRWDGDSEGFDILNDWHFGAY
KEDLGRRDGGSRHLWQWREHQRKKSLLRRKDQYRVLAARLSRKYSVLILEDLNLSKLQEHNKSEDDAVEIKEA
RWQQRAAACYELRECLKQAFLSRGGRVLKVKAAMTTQRCFCCGCEKKWDPIPSINHTCDQCGKTWDQDANAAK
NIMLLYDKKEFSEQSSGVKKEDAESLSKWGKIGRHKKTSLKLTDNQPEQLN (SEQ ID NO: 155)
>3300011414|Ga0137442_1000121_10
[aquatic-sediment-groundwater sediment]
MKRKTSTTPTRIWSFGALEPTENQKALLDQLFFANRYYNTLIEIERKRRNRFREIRSEAVPELSMLEKRYQQL
DADYVQMVAALPKPEKGKRKTLTPEVLANKEERKTTSARMKVLRAAFLEDADAKIQTAKADEEAQLAVKAARA
ATDLYWGTYLLIERQVDEARKSKSDPDFRRFDGQGRVGVQLQGGLSTPELLSGEDSRLRLQPRTSTPRVKKPK
AQHEVRIRIGSLGRDPIWATLPVIVHRPLPEDAEVKWAWVRIVRCGRRRIYSLQLTLESATFDRSQSGVGTVA
INFGWRANEDGSRRVAYAVDDAGKEQVLSIPASIEKDTTQANSLRSLRDLHFEEAKRSLVAFAALHPKAMPEW
YAEEAKFLHQWRNPARLVRLAQRLAEEHPVDSNELLRWRQERLGGARFGRHWRSPGAPKQDLFAPFPEVMSWS
TTRGIGALNFYLELWARKDKHLWGWEASLRRSVDLRRNDLFRTWAKRMTAYAEVRVEEFDLRKMTAIPAVGEE
PRDSSFRSAQRAASPGKLRERIAEACGAKVMKGAAFHNTVTCFLCSHVNERSMEHRTVCAGCGEEFDQDANNC
RNQLRERPSGAPEAGGARNPQKDPVVSDGYDESTVDRDVPSGVVAAE (SEQ ID NO: 156)
>3300011431|Ga0137438_1001223_2
[aquatic-sediment-groundwater sediment]
MKRKTSTTPTRIWSFGALEPTENQKALLDQLFFANRYYNTLIEIERKRRNRFREIRSEAVPELSMLEKRYQQL
DADYVQMVAALPKPEKGKRKTLTPEVLANKEERKTTSARMKVLRAAFLEDADAKIQTAKADEEAQLAVKAARA
ATDLYWGTYLLIERQVDEARKSKSDPDFRRFDGQGRVGVQLQGGLSTPELLSGEDSRLRLQPRTSTPRVKKPK
AQHEVRIRIGSLGRDPIWATLPVIVHRPLPEDAEVKWAWVRIVRCGRRRIYSLQLTLESATFDRSQSGVGTVA
INFGWRANEDGSRRVAYAVDDAGKEQVLSIPASIEKDTTQANSLRSLRDLHFEEAKRSLVAFAALHPKAMPEW
YAEEAKFLHQWRNPARLVRLAQRLAEEHPVDSNELLRWRQERLGGARFGRHWRSPGAPKQDLFAPFPEVMSWS
TTRGIGALNFYLELWARKDKHLWGWEASLRRSVDLRRNDLFRTWAKRMTAYAEVRVEEFDLRKMTAIPAVGEE
PRDSSFRSAQRAASPGKLRERIAEACGAKVMKGAAFHNTVTCFLCSHVNERSMEHRTVCAGCGEEFDQDANNC
RNQLRERPSGAPEAGGARNPQKDPVVSDGYDESTVDRDVPSGVVAAE (SEQ ID NO: 156)
>3300011441|Ga0137452_1000071_9
[aquatic-sediment-groundwater sediment]
MKRASREAGQVVVYRYGCPSWADLPESGMVQLRLAHDLRNELVAVEYRYRELIDGIWSSQSAVSVAELALADA
TAAVERAAALMLAQRKIDRSTIPRAGAKQALAEARAARREAKLTVKVAKAIDKEAAGPLLADAKAARYAAITS
TRAEYVVAGLFWATANDVVQNHDTAAKLVALAWKQGRPARRRTRPWKGTGTITTQVMWQAGKPARTPGVLASA
TSPWRNVFRIEPGRSRGEWPGQPSSGGTVRDDHATVHLRIEKGAEAICLPIVLHRPLPTDGDVAGVQITRRRI
AGCYRLSIAITVRLPEPTPALGGVPVSVTFGWAAAGDGAVHVARLGAPFGLGPPPPWLVKHLVAIPASATDVD
VFAPAIWRLLLARDDSIRGHRDDLLDGLREQVITALDEGVEVRLWPDDEDLLRSPVVARWRAPRRFVTLARAW
PVEHPMAAMLEAWRLRDRHLWEYESHERDQVIARRRDAYRSVAAWICGQASEILLDYPPVAELRQVPDVNEED
EYVARAGRRQVQFAAPGDLRAAIEVAARRRGVKVIDVRVPPE (SEQ ID NO: 157)
>3300006855|Ga0079044_1002244_2
[aquatic-thermal springs-hot spring]
MRVYRYGAKLRGPLDPVAEEQVELANRFWNELVDMHRKYGELLQKAQEEASPALAALRAEMAALAEEKIRLRG
LIKKSRQKARGNVPADPAIKEQLRAVSQRIKELKPIVKMEKEKAKTASSDERHRLSEQQKLEKKRLRQKYAAL
GLYWSNYNAVLQGFDTAVKRELETQGRLRVRKHAPSGAAVWTVRIQHPTGAREYTWADATRGDPSKPFSIIMP
DSEREEFTTHDGRTLSRRRLPVARLRVRAERAKTPDGTWVEFGGHHIDVPFYMHRQPPPTARVVMARLVRKRI
ADCYEYHLCITVDEPPAPKRSGTAAGVDLGWRRLPDGAVRVAYVAGEDGAKGALAVPQSTLDRLAHAERLQGI
RDSALEGIRSDFVAWAKPLLGNPALPDFVAAALAGDREHGIPPLASWRSPRRFARLTGQLVRWAADHPNQAAA
LPDWPAWNRRIQSWNRQDKPLWRTLSFLRVKAIAHRNEQYRIFAKRLAERYAYIVLEDMDIQDMNRKPQAEQA
PETSQQKLRHLARAAAPAAVRSAIENASWRWGSTFVKVDPANTTRRHAPCGNLVEQNYAESVMVYCPECKVWY
DQDENAAVNLLLRIRENPPPAPTNPKPANGSRWQRAKAKAR (SEQ ID NO: 158)
>3300006855|Ga0079044_1002244_2
[aquatic-thermal springs-hot spring]
MGPPAEAPGPRRDTAHSTEEEIASMRVYRYGAKLRGPLDPVAEEQVELANRFWNELVDMHRKYGELLQKAQEE
ASPALAALRAEMAALAEEKIRLRGLIKKSRQKARGNVPADPAIKEQLRAVSQRIKELKPIVKMEKEKAKTASS
DERHRLSEQQKLEKKRLRQKYAALGLYWSNYNAVLQGFDTAVKRELETQGRLRVRKHAPSGAAVWTVRIQHPT
GAREYTWADATRGDPSKPFSIIMPDSEREEFTTHDGRTLSRRRLPVARLRVRAERAKTPDGTWVEFGGHHIDV
PFYMHRQPPPTARVVMARLVRKRIADCYEYHLCITVDEPPAPKRSGTAAGVDLGWRRLPDGAVRVAYVAGEDG
AKGALAVPQSTLDRLAHAERLQGIRDSALEGIRSDFVAWAKPLLGNPALPDFVAAALAGDREHGIPPLASWRS
PRRFARLTGQLVRWAADHPNQAAALPDWPAWNRRIQSWNRQDKPLWRTLSFLRVKAIAHRNEQYRIFAKRLAE
RYAYIVLEDMDIQDMNRKPQAEQAPETSQQKLRHLARAAAPAAVRSAIENASWRWGSTFVKVDPANTTRRHAP
CGNLVEQNYAESVMVYCPECKVWYDQDENAAVNLLLRIRENPPPAPTNPKPANGSRWQRAKAKAR (SEQ ID
NO: 159)
>3300009503|Ga0123519_10000481_19
[aquatic-thermal springs-hot spring]
MRQLRVAHEVYNTLVQYERERRKAVADATRETDAEVARLEAEVEGLLSRLADLRAAIQAARAGGGDNARLAEA
QAEARECRRLLGEAKGALRETKRVARQNPALRERLEAIKAEHHRRQLALYHEVVEVGKRLYWPSWNDTKAAVE
QAAKKTKNGDLRFRRWTGEGSLYTQVQGKQPVCETATSRWVRIDPVPPEAHDPATPRGERRRLCRTRFYLRIG
STGPREDPVFAVFPMVYHRPLPEGAVICGARIVRRKNADREYWQAVVTVDLPDEAAQKSGPRVCALDIGWRDR
RPGGSDEPPPLRVAAWYDGDRTGEVLVDPSVFERCAKADAIRSTRDRMLDDLRAWLCEARKDLPEHLAEALAG
CGLWRAAGKFARLRGLLSSGDVPAEVRDRFLAWYHRDRHLWQYEHGMRLNAIRDRDNAYRIAAKRFAQEYDVL
IVEATGTPQKERDPKAPAAMDLRPLIKEPDPEDAPPRDQQRERKENKAHHQRFIAAAGTFRRYLLEAAAKYGT
RVVMVPCEQTTLECWVCGAKYEFDRWPLMHECESCGTTWDQDQNAARNLFARGAVAAKGPGPLEVQGKPRLPR
WHKRHKAYREGGAG (SEQ ID NO: 160)
>3300009503|Ga0123519_10000481_22
[aquatic-thermal springs-hot spring]
MATRNCRYGLLAPVEGRDEVMRQLRVAHEVYNTLVQYERERRKAVADATRETDAEVARLEAEVEGLLSRLADL
RAAIQAARAGGGDNARLAEAQAEARECRRLLGEAKGALRETKRVARQNPALRERLEAIKAEHHRRQLALYHEV
VEVGKRLYWPSWNDTKAAVEQAAKKTKNGDLRFRRWTGEGSLYTQVQGKQPVCETATSRWVRIDPVPPEAHDP
ATPRGERRRLCRTRFYLRIGSTGPREDPVFAVFPMVYHRPLPEGAVICGARIVRRKNADREYWQAVVTVDLPD
EAAQKSGPRVCALDIGWRDRRPGGSDEPPPLRVAAWYDGDRTGEVLVDPSVFERCAKADAIRSTRDRMLDDLR
AWLCEARKDLPEHLAEALAGCGLWRAAGKFARLRGLLSSGDVPAEVRDRFLAWYHRDRHLWQYEHGMRLNAIR
DRDNAYRIAAKRFAQEYDVLIVEATGTPQKERDPKAPAAMDLRPLIKEPDPEDAPPRDQQRERKENKAHHQRF
IAAAGTFRRYLLEAAAKYGTRVVMVPCEQTTLECWVCGAKYEFDRWPLMHECESCGTTWDQDQNAARNLFARG
AVAAKGPGPLEVQGKPRLPRWHKRHKAYREGGAG (SEQ ID NO: 161)
>3300006865|Ga0073934_10032691_1
[aquatic-thermal springs-hot spring sediment]
MFGHESLPSRIYSYGTMKLGDFPGRDKAEEQMRLAHRYRNRLVEIELARRRAVEEALRRLSPDLVGCELAIEA
QERALEVARSSIRRASAEARKKVASPEARDAAKTAIAHLKRERAKRMSLRKALFSSSDWEAEEKRISDEAGAA
IRKARAECGLYWGTYLHVEGTVKRTGAPPRFHRWDGSGHLAVQIQHGMTWAEALAGADNRLRVRHAPPTNSKH
SQLLHVVSVRVGSTEDGFPVWADVPRVVLHRPIPDGARIKWVHLIRRRIGCSQKWHVQFVVSAESWERTDRAT
SGTVGINVGWRMRPDGSLRVAAFCGDDGRRGELCLPSRWLAQWKKTEDIRSIRDRNFDDVRTAIANWVKGTIP
EHVRALTGEVMPELPPWWRQRAATLASWKSPARLAALTLHWRANRFAGDAVMFPLVEDWRRRDRHLYEYERHL
ADQLLAEREDLYRVFAADLRRRYKTAIVMELDLRDFHVLPPAEEPTPDGALREHTRDACLSLLHRCLDESMSE
VIRSDPRNVTRMCRECGGLNDWDRKVLHRVCSWCHAEWDQDENAARNLRDRTGGGASDKVA (SEQ ID NO:
162)
>3300001340|JGI20133J14441_1002607_2
[aquatic-thermal springs-hypersaline mat]
MPFGKKRSDKVAIVYEYGCLPPEGGLPAVAERQLVLADDFWNSLADIDRRHRAKMREILDDGELGKLNAHITS
CKARIEELRGQIKGVNQRERRNAGVDANTKAEIARLKAEVKATAARIKEIKPEHIAKQKPLLEENDALRQAAV
KRARQWFSDRGLYWGTYNAVLRSYETAHKVLLKSGEQMQAHRYTGEGRWVVQIITTAGEKPTTAEDLATGTMV
QIDPVDFSDWKHISRGERRRRARTKCRIRVGSEGRAPVWLELPCVMHRPLPEGAEIVGADVTRRLVGPARWEY
RLHLTLRVPAPVPADAAKPAIGVDIGWRALPNGGTRVAYAVGEDGSRKEVVCPDDILAGLAKSSDLRSLRDEK
MNRIKAFLRDVIPGLDSADLSEQTEHLAMWKSPKRLIRLYRWWKEHRVEGDTEAFGRLHEWYYHDYWHLYQYE
DDMRQQVLARRRDMYRIAAKEIAERASVVVIEEFDLRKFAQEDQPEDGEDNKIQRARRVAVAPSEFRIALRQA
CAARGVRVVEKPAQNTTRVHVVCGQVVAADYAADVTVRCPRCGVAYDQDANAALNLLGAGRGESTPAAS
(SEQ ID NO: 163)
>3300009784|Ga0123357_10000018_105
[arthropoda-digestive system-termite gut]
MITVVQYGVWHKWMRDVPRDVMDQLWLSHCVREDFVSTTLAYDARLKEIWSSFPVVGEAECRLLEASDALDVL
LEEQRVVRQSSRSKKVSADLRSRLADARGVVRAARVGRRDAIQVAKDAAMPLIVQAKDAQREARRGLYAKYCS
YGVPDRDGRVIRLYHATFNDVRVMHEAAEKRLASSRKQGGRGQMRHHRFDGTGTLCVSLLRTAGDPPRTPMVV
ANSESGAYRNVLGVPWVAPVVWEGLSRSQRRADGRVGVRMRVGYGDDLKSPTHVDIPVQAHRFLPAEADITGA
KLSIRRRGTKLIGSLSITAKDVPDPLPVKDGPSIVLHWGWRDVPTGGAEVARWVSTSPLDIPVDMRGVFTCHD
ESRMSGAVIAPAVMFTKLDHVEALQSELDTAFNEARGVLSEWLRAHPDVVVDDPTSREPVVLTGAVVGAWRSH
ERLARLAWAWHRECPAGVEDMESVLWEWRCGHRHVSNIAANTRARAINARRDVYRNVAAVISGQCGGVGVDDM
DLARLASRGASSELPDTVTAPGSRRRVYAAPGELRYCIVSACQKDGVTVVTLDTAENSHTCHACGYANPGDDR
WLNPMVLCDGCGKVFDQNTNALLNLVDKYTATLAV (SEQ ID NO: 164)
>3300009784|Ga0123357_10000074_42
[arthropoda-digestive system-termite gut]
MVVAPPPVCDLRGNIPWILSWIIDEPAMLGMLLALYAGTLSEMIRVYRYGLLAPTMNGKLVKEQMRAAHRYRN
ALIEIECARRDALRRLLTESGLRELEEETAAANEAVHAAAAAAREARMTVQSKSEPIDARQRMRDAREVSRRA
LDALRVRRREVRENHAVQRAMDEINERAARLRRGARALCGVYWGTYLLVEDADHRARAAALYDGAQPNNPRCS
RFVGAGRVGVQIQKGFPCETLFGSDARLRVAPVDSGAWHSMRRGERRQLSRTTLSLRIGSEGRDPIWAQWPML
MHRPLPEGSIVKRATVSVRRRGPRDEWAVEITVDVADEILAVQRTDSNESAVAIHIGWRAIGNELRVAAWAGS
DGRSGELRLPASLLGAFAKVEELRSIRDRNLAAARDALSGWLAAAASIPEWLREATVGIMEWRVPSRLAVLAK
QWRNVRFVGDEKAYEALEAWRYHDYHLWSWEDSQRIHALRARRELYRIFAAQLAREYVSIVIEDFDLRVVAKR
HLVEDASIEWRGLRRNRQAAAVSELRASLQNASKSRSARIELLDTRSFLQPCHACGSKERFDSVEPLDHSCSG
CGAIWDRDSNAALVLLQRWRREHACGGEVAHADVDTKPVPEGRWVRARRHRAEKDAHARFGASDNSEWFGNGN
ASVISIESPS (SEQ ID NO: 165)
>3300009784|Ga0123357_10000076_32
[arthropoda-digestive system-termite gut]
MITVIKYGVWHTWSRHIPDSVRDQLWLAHCAREDLVTTTLDYHDALKDIWSSFPEVAAAEQRIRDADDLLATL
LDEQSKARQASQSKKVPTDLRQRLTQARASVRSAKQERRDAITTAGVIATPLIAQAKDAQYARRKELYTTYCT
RGIPDRDGRIVRLYHATFNDVRTSHETAEKRISASRANGSPAQMRHHRFDETGTLAVSLLRQAGAPPRTPQVL
ADTETGKYRNVLAMPWFTPDAWAGKTRAQQRVDGRVTLRMRIGYADDLSSPTFVDLPVQAHRFFPPEADITGA
KLTIQRRGTTFHATVSITGKGLPDPTPVTSGPAVVLHWGWREVDTDIVEVARWAADAPLHIPDDMGDVFTTDG
SGTGGSILTPKTVFTRLNHVEKLQSEQGTAFSSAKNALVSWLSTHATPMGDPTSKQPQPLAPALVDAWRSPDR
LARLAWLWRDDRPDGADDLTADLLAWRGAYRHTATLIANTRAKAISHRNDVYRNVAAVISGQAATVGLDSMDL
ATIAATSARSELSGDVTQPGARRRTYAAPGTLREYIAAACAKDGVTVSSLDSSHASRTHYECGHTNPRDTKWL
NPIVRCDGCGESFDQNTNALHHLQARQRDLSLTA (SEQ ID NO: 166)
>BBPF01004549_6
[groundwater metagenome]
MPFGRKAKPCRVFEYGCLPPVSGKDELLKELRLRNNYWNKLVEIDRLIRQRSALILLLPGDIEAAHLDAQIDL
MRGEIKKGRQRTRSSITDADLKQRIKDSIAELRVLWEQNKKDRKPLIETTRADLAAIETEWRVARKAARADSG
LYWCNYDDVDTAYDVARKETAKKWAFPKFRRFDGTGKVTVRWQNGLNANNVFDGTGTLLQIAPVHQDAWNHPV
RSNRRKASRTTVRFRVRSENRSPVWVELPMVMHRPLPAGGEIRSASLVCGYVGGKPTYKLVITVAPPAHTLPE
EGMHRGIRPTVGINLGWRKKDNDIRIAYWADEEGRHGELTLTSNTLAQFSKLNDLKSIRDKYFNEAISALALY
ISEGTIPDWLKADTTHLNKWRSKPRLLALVGKWRETRFTGDEIIYEALFYWRGRELHLHQWEANLRDQVQRHR
RERYRIFAAQLAKDYSQIFIENHNLVVTKKKKATEDGTYLTTEVDTLRTIASPGILRGQIENACRREGVIFTK
LDAKHITSKCHICGWQEKWNAAATITRECPGCKTEWDQDYNAARLLLQRGLDGGYLAVPQTTLEDDPNFCIGS
(SEQ ID NO: 167)
>BBPG01001333_4
[groundwater metagenome]
MPFGRKAKPCRVFEYGCLPPVSGKDELLKELRLRNNYWNKLVEIDRLIRQRSALILLLPGDIEAAHLDAQIDL
MRGEIKKGRQRTRSSITDADLKQRIKDSIAELRVLWEQNKKDRKPLIETTRADLAAIETEWRVARKAARADSG
LYWCNYDDVDTAYDVARKETAKKWAFPKFRRFDGTGKVTVRWQNGLNANNVFDGTGTLLQIAPVHQDAWNHPV
RSNRRKASRTTVRFRVRSENRSPVWVELPMVMHRPLPAGGEIRSASLVCGYVGGKPTYKLVITVAPPAHTLPE
EGMHRGIRPTVGINLGWRKKDNDIRIAYWADEEGRHGELTLTSNTLAQFSKLNDLKSIRDKYFNEAISALALY
ISEGTIPDWLKADTTHLNKWRSKPRLLALVGKWRETRFTGDEIIYEALFYWRGRELHLHQWEANLRDQVQRHR
RERYRIFAAQLAKDYSQIFIENHNLVVTKKKKATEDGTYLTTEVDTLRTIASPGILRGQIENACRREGVIFTK
LDAKHITSKCHICGWQEKWNAAATITRECPGCKTEWDQDYNAARLLLQRGLDGGYLAVPQTTLEDDPNFCIGS
(SEQ ID NO: 167)
>OGZV01009429_1
[human gut metagenome]
MNKVSITKVFKYRCFEPVEGLALFDEALDNRHTLWNKLVEIDRDFREKSTQIITPIKSDYQVLDQEIKNLQDS
IKAIKRKTRSTAKEETRNIQDTIKELKVKRKEAYQEFKRLKHEAIEREKPLLDCLNNERKEKVKQLRSESGLH
GFNFDDVIHNIYDVARIKAMKQGTLLQFKRYSKNGKIAVRPYSSSPLYGSDIHRVNTIFYIEPVNQELYNSPI
RGVRKKASVTRCHIRVGSADKGKPIFVTLPMVYHRPLPMDGKINAINVKRHYIDHKPIYECLITVTYAIEAPT
INPNSCVAVDLGWRMTKDGLRAAYAIDTDDKTIECIVTQRQLNEFDTICGLSSTRQKHLNDCIHVIKAWMANK
NLPDWLTDAVAYIDKWKSYTHIFDLHSAFLQHKKSGNQEIVSYLEAYIERENHLRTWQSNLQNQVIARRNYEY
QNFAAKLANMYDVLVLEKLSITNIVKHQKAIIGSQQSTAVDRNRTIVAPYVLKTILINAFRSRGKQFVEVNAS
YSTKVCHHCGALEEVHQSSIMHTCTQCHTVWDQDYNACINLLALYNHDNKGGVSCV (SEQ ID NO: 168)
>OKWZ01000119_10
[human gut metagenome]
MNKVSITKVFKYRCFEPVEGLSLFDEALDNRHMLWNKLVEIDRDFREKSSKIITPIQSDYQVLDQEIKNLQDA
VKAIKCKTRSTAKEETRTIQDTIKELKVKRKEAYQEFKRLKHEAIEREKPLLDCLNNERKEKVKQLRSKSGLH
GFNFDDVTHNIYEVARVKAMKQGTLLRFKRYSKNGKIAVRPYSNSPLYGSDIHRVNTIFYIDPVNQELYNSPI
RGVRKKASVTQCHIRIGSAVKGKPIFVTLPMVYHRPLPMDGKINAINIKRHYIDQKPIYECFITVTYLIEAPA
VNPNSCVAVDLGWRMTKDGLRAAYATDKDHKAIECIVTQRQLNEFDTIRGLSSTRQKHFNDCIHVIKAWIANK
NLPDWLIDAVAYIDKWKSYTHIFKLYNAFLQHEKSGNQEIISYLEAYIERENHLRIWQSNLQDQAIAKRNYEY
QNFAARLANMYDVLVLEKLSITDIVKYQKAIIGSQQSTALDRNRTIVAPYELKTILINAFTSRGKQFVEVNAS
YSTKVCHHCGALEEVHQSSIMHICTQCHTVWDQDYNACINLLALYDNKVGAY (SEQ ID NO: 169)
>ODGR01000476_16
[human metagenome]
MNKVSITKVFKYRCFEPVEGLALFDEALDNRHTLWNKLVEIDRDFREKSSQIITPIQSDYQVLDQEIKNLQDS
IKAIKRKTRSTAKEETRNIQDTIKELKVKRKEAYQEFKRLKHEAIEREKPLLDCLNNERKEKVKQLRSESGLH
GFNFDDVIHNIYDVARIKAMKQGTLLQFKRYSKNGKIAVRPYSSSPLYGSDIHRVNTIFYIEPVNQELYNSPI
RGVRKKASVTRCHIRVGSADKGKPIFVTLPMVYHRPLPMDGKINAINVKRHYFDHKPIYECLITVTYAIEAPT
INPNSCVAVDLGWRMTKDGLRAAYAIDTDDKTIECIVTQRQLNEFDTICGLSSTRQKHLNDCIHVIKAWMANK
NLPDWLTDAVAYIDKWKSYTHIFDLHSAFLQHKKSGNQEIVSYLEAYIERENHLRTWQSNLQNQVIARRNYEY
QNFAAKLANMYDVLVLEKLSITDIVKHQKAMIGSQQSTALDRNRTIVAPYELKTILINAFTNRGKQFVEVNAS
YSTKVCHHCGALEEVHQSSIMHICTQCHTVWDQDYNACINLLALYNHNNKVGVSCV (SEQ ID NO: 170)
>ODIG01000268_14
[human metagenome]
MNKVSITKVFKYRCFEPVEGLSLFDEALDNRHMLWNKLVEIDRDFREKSSKIITPIQSDYQVLDQEIKNLQDA
VKAIKCKTRSTAKEETRTIQDTIKELKVKRKEAYQEFKRLKHEAIEREKPLLDCLNNERKEKVKQLRSKSGLH
GFNFDDVIHNIYEVARVKAMKQGTLLRFKRYSKNGKIAVRPYSNSPLYGSDIHRVNTIFYIDPVNQELYNSPI
RGVRKKASVTQCHIRIGSAVKGKPIFVTLPMVYHRPLPMDGKINAINIKRHYIDQKPIYECFITVTYLIEAPA
VNPNSCVAVDLGWRMTKDGLRAAYATDKDHKAIECIVTQRQLNEFDTIRGLSSTRQKHFNDCIHVIKAWIANK
NLPDWLIDAVAYIDKWKSYTHIFKLYNAFLQHEKSGNQEIISYLEAYIERENHLRIWQSNLQDQAIAKRNYEY
QNFAARLANMYDVLVLEKLSITDIVKYQKAIIGSQQSTALDRNRTIVAPYELKTILINAFTSRGKQFVEVNAS
YSTKVCHHCGALEEVHQSSIMHTCTQCHTVWDQDYNACINLLALYDNKVGAY (SEQ ID NO: 169)
>ODIP01002140_2
[human metagenome]
MNKVSITKVFKYRCFEPVEGLALFDEALDNRHMLWNKLVEIDRNFREKSSQIITPIQSDYQVLDQKIKNLQDS
IKAIKRKTRSTAKEETRNIQDTIKELKVKRKEAYQEFKRLKHEAIEREKPLLDCLNNERKEQVKQLRSKSGLH
GFNFDDVIHNIYDVARVKAMKQGTLLRFKRYSKNGKIAVRPYSNSPLYGADIHKVNTIFYIEPVNQELYNSPI
RGVRKKASVTQCHIRVGSADKGKPIFVTLPMVYHRPLPMDGKINAINVKRHYIDHKPIYECLITVTYVIEAPA
VNPSSCVAVDLGWRMTKDGLRAAYATDKDNKTMECIVAQRQLNEFDTIRGLSSTRQKHFNDCIHVIKAWIANK
NLPDWLIDAVAYIDKWKSYTHIFELYNAFLQHEKSGNQEIVSYLEAYIERENHLRIWQSNLQDQVIAKRNYEY
QNFAAKLANMYDVLVIEKLSITDIVKHQKAIIGSQQSTALDRNRTIVAPYVLKTILINAFTSRGKQFVEVNAS
YSTKVCHHCGALEEVHQSSIMHTCTQCHTIWDQDYNACINLLTLYNHDNKVGVSCV (SEQ ID NO: 171)
>ODIW01000227_18
[human metagenome]
MNKVSITKVFKYRCFEPVEGLALFDEALDNRHMLWNKLVEIDRNFREKSSQIITPIQSDYQVLDQKIKNLQDS
IKAIKRKTRSTAKEETRNIQDTIKELKVKRKEAYQEFKRLKHEAIEREKPLLDCLNNERKEQVKQLRSKSGLH
GFNFDDVIHNIYDVARVKAMKQGTLLRFKRYSKNGKIAVRPYSNSPLYGADIHKVNTIFYIEPVNQELYNSPI
RGVRKKASVTQCHIRVGSADKGKPIFVTLPMVYHRPLPMDGKINAINVKRHYIDHKPIYECLITVTYVIEAPA
VNPSSCVAVDLGWRMTKDGLRAAYATDKDNKTMECIVAQRQLNEFDTIRGLSSTRQKHFNDCIHVIKAWIANK
NLPDWLIDAVAYIDKWKSYTHIFELYNAFLQHEKSGNQEIVSYLEAYIERENHLRIWQSNLQDQVIAKRNYEY
QNFAAKLANMYDVLVIEKLSITDIVKHQKAIIGSQQSTALDRNRTIVAPYVLKTILINAFTSRGKQFVEVNAS
YSTKVCHHCGALEEVHQSSIMHTCTQCHTIWDQDYNACINLLTLYNHDNKVGVSCV (SEQ ID NO: 171)
>ODJA01000260_38
[human metagenome]
MNKVSITKVFKYRCFEPVEGLSLFDEALDNRHMLWNKLVEIDRDFREKSSKIITPIQSDYQVLDQEIKNLQDA
VKAIKCKTRSTAKEETRTIQDTIKELKVKRKEAYQEFKRLKHEAIEREKPLLDCLNNERKEKVKQLRSKSGLH
GFNFDDVTHNIYEVARVKAMKQGTLLRFKRYSKNGKIAVRPYSNSPLYGSDIHRVNTIFYIDPVNQELYNSPI
RGVRKKASVTQCHIRIGSAVKGKPIFVTLPMVYHRPLPMDGKINAINIKRHYIDQKPIYECFITVTYLIEAPA
VNPNSCVAVDLGWRMTKDGLRAAYATDKDHKAIECIVTQRQLNEFDTIRGLSSTRQKHFNDCIHVIKAWIANK
NLPDWLIDAVAYIDKWKSYTHIFKLYNAFLQHEKSGNQEIISYLEAYIERENHLRIWQSNLQDQAIAKRNYEY
QNFAARLANMYDVLVLEKLSITDIVKYQKAIIGSQQSTALDRNRTIVAPYELKTILINAFTSRGKQFVEVNAS
YSTKVCHHCGALEEVHQSSIMHTCTQCHTVWDQDYNACINLLALYDNKVGAY (SEQ ID NO: 169)
>ODJP01000229_55
[human metagenome]
MNKVSITKVFKYRCFEPVEGLSLFDEALDNRHMLWNKLVEIDRDFREKSSKIITPIQSDYQVLDQEIKNLQDA
VKAIKCKTRSTAKEETRTIQDTIKELKVKRKEAYQEFKRLKHEAIEREKPLLDCLNNERKEKVKQLRSKSGLH
GFNFDDVTHNIYEVARVKAMKQGTLLRFKRYSKNGKIAVRPYSNSPLYGSDIHRVNTIFYIDPVNQELYNSPI
RGVRKKASVTQCHIRIGSAVKGKPIFVTLPMVYHRPLPMDGKINAINIKRHYIDQKPIYECFITVTYLIEAPA
VNPNSCVAVDLGWRMTKDGLRAAYATDKDHKAIECIVTQRQLNEFDTIRGLSSTRQKHFNDCIHVIKAWIANK
NLPDWLIDAVAYIDKWKSYTHIFKLYNAFLQHEKSGNQEIISYLEAYIERENHLRIWQSNLQDQAIAKRNYEY
QNFAARLANMYDVLVLEKLSITDIVKYQKAIIGSQQSTALDRNRTIVAPYELKTILINAFTSRGKQFVEVNAS
YSTKVCHHCGALEEVHQSSIMHTCTQCHTVWDQDYNACINLLALYDNKVGAY (SEQ ID NO: 169)
>ODKZ01007116_1
[human metagenome]
MNKVSITKVFKYRCFEPVEGLALFDEALDNRHTLWNKLVEIDRNFREKSSQIITPIQSDYQVLDQEIKNLQDS
IKAIKRKTRSTAKEETRNIQDTIKELKVKRKEAYQEFKRLKHEAIEREKPLLDCLNNERKEKVKQLRSESGLH
GFNFDDVIHNIYDVARIKAMKQGTLLQFKRYSKNGKIAVRPYSSSPLYGSDIHRVNTIFYIEPVNQELYNSPI
RGVRKKASVTRCHIRVGSADKGKPIFVTLPMVYHRPLPMDGKINAINVKRHYIDHKPIYECLITVTYAIEAPT
INPNSCVAVDLGWRMTKDGLRAAYATDTDDKTIECIVTQRQLNEFDTICGLSSTRQKHLNDCIHVIKAWMANK
NLPDWLTDAVAYIDKWKSYTHIFDLHSAFLQHKKSGNQEIVSYLEAYIERENHLRTWQSNLQNQVIARRNYEY
QNFASKLANMYDVLVLEKLSITDIVKHQKAMIGSQQSTALDRNRTIVAPYELKTILINAFTNRGKQFVEVNAS
YSTKVCHHCGALEEVHQSSIMHTCTQCHTVWDQDYNACINLLALYNHNNKVGVSCV (SEQ ID NO: 172)
>ODM001000523_12
[human metagenome]
MNKVSITKVFKYRCFEPVEGLSLFDEALDNRHMLWNKLVEIDRDFREKSSKIITPIQSDYQVLDQEIKNLQDA
VKAIKCKTRSTAKEETRTIQDTIKELKVKRKEAYQEFKRLKHEAIEREKPLLDCLNNERKEKVKQLRSKSGLH
GFNFDDVTHNIYEVARVKAMKQGTLLRFKRYSKNGKIAVRPYSNSPLYGSDIHRVNTIFYIDPVNQELYNSPI
RGVRKKASVTQCHIRIGSAVKGKPIFVTLPMVYHRPLPMDGKINAINIKRHYIDQKPIYECFITVTYLIEAPA
VNPNSCVAVDLGWRMTKDGLRAAYATDKDHKAIECIVTQRQLNEFDTIRGLSSTRQKHFNDCIHVIKAWIANK
NLPDWLIDAVAYIDKWKSYTHIFKLYNAFLQHEKSGNQEIISYLEAYIERENHLRIWQSNLQDQAIAKRNYEY
QNFAARLANMYDVLVLEKLSITDIVKYQKAIIGSQQSTALDRNRTIVAPYELKTILINAFTSRGKQFVEVNAS
YSTKVCHHCGALEEVHQSSIMHTCTQCHTVWDQDYNACINLLALYDNKVGAY (SEQ ID NO: 169)
>ODTN01000195_35
[human metagenome]
MNKVSITKVFKYRCFEPVEGLSLFDEALDNRHMLWNKLVEIDRDFREKSSKIITPIQSDYQVLDQEIKNLQDA
VKAIKCKTRSTAKEETRTIQDTIKELKVKRKEAYQEFKRLKHEAIEREKPLLDCLNNERKEKVKQLRSKSGLH
GFNFDDVTHNIYEVARVKAMKQGTLLRFKRYSKNGKIAVRPYSNSPLYGSDIHRVNTIFYIDPVNQELYNSPI
RGVRKKASVTQCHIRIGSAVKGKPIFVTLPMVYHRPLPMDGKINAINIKRHYIDQKPIYECFITVTYLIEAPA
VNPNSCVAVDLGWRMTKDGLRAAYATDKDHKAIECIVTQRQLNEFDTIRGLSSTRQKHFNDCIHVIKAWIANK
NLPDWLIDAVAYIDKWKSYTHIFKLYNAFLQHEKSGNQEIISYLEAYIERENHLRIWQSNLQDQAIAKRNYEY
QNFAARLANMYDVLVLEKLSITDIVKYQKAIIGSQQSTALDRNRTIVAPYELKTILINAFTSRGKQFVEVNAS
YSTKVCHHCGALEEVHQSSIMHTCTQCHTVWDQDYNACINLLALYDNKVGAY (SEQ ID NO: 169)
>ODTP01000194_18
[human metagenome]
MNKVSITKVFKYRCFEPVEGLALFDEALDNRHTLWNKLVEIDRNFREKSSQIITPIQSDYQVLDQEIKNLQDS
IKAIKRKTRSTAKEETRNIQDTIKELKVKRKEAYQEFKRLKHEAIEREKPLLDCLNNERKEKVKQLRSESGLH
GFNFDDVIHNIYDVARIKAMKQGTLLQFKRYSKNGKIAVRPYSSSPLYGSDIHRVNTIFYIEPVNQELYNSPI
RGVRKKASVTRCHIRVGSADKGKPIFVTLPMVYHRPLPMDGKINAINVKRHYIDHKPIYECLITVTYAIEAPT
INPNSCVAVDLGWRMTKDGLRAAYATDTDDKTIECIVTQRQLNEFDTICGLSSTRQKHLNDCIHVIKAWMANK
NLPDWLTDAVAYIDKWKSYTHIFDLHSAFLQHKKSGNQEIVSYLEAYIERENHLRTWQSNLQNQVIARRNYEY
QNFASKLANMYDVLVLEKLSITDIVKHQKAMIGSQQSTALDRNRTIVAPYELKTILINAFTNRGKQFVEVNAS
YSTKVCHHCGALEEVHQSSIMHTCTQCHTVWDQDYNACINLLALYNHNNKVGVSCV (SEQ ID NO: 172)
>ODWI01002981_3
[human metagenome]
MNKVSITKVFKYRCFEPVEGLSLFDEALDNRHMLWNKLVEIDRDFREKSSKIITPIQSDYQVLDQEIKNLQDA
VKAIKCKTRSTAKEETRTIQDTIKELKVKRKEAYQEFKRLKHEAIEREKPLLDCLNNERKEKVKQLRSKSGLH
GFNFDDVTHNIYEVARVKAMKQGTLLRFKRYSKNGKIAVRPYSNSPLYGSDIHRVNTIFYIDPVNQELYNSPI
RGVRKKASVTQCHIRIGSAVKGKPIFVTLPMVYHRPLPMDGKINAINIKRHYIDQKPIYECFITVTYLIEAPA
VNPNSCVAVDLGWRMTKDGLRAAYATDKDHKAIECIVTQRQLNEFDTIRGLSSTRQKHFNDCIHVIKAWIANK
NLPDWLIDAVAYIDKWKSYTHIFKLYNAFLQHEKSGNQEIISYLEAYIERENHLRIWQSNLQDQAIAKRNYEY
QNFAARLANMYDVLVLEKLSITDIVKYQKAIIGSQQSTALDRNRTIVAPYELKTILINAFTSRGKQFVEVNAS
YSTKVCHHCGALEEVHQSSIMHTCTQCHTVWDQDYNACINLLALYDNKVGAY (SEQ ID NO: 169)
>ODZZ01005262_2
[human metagenome]
MNKVSITKVFKYRCFEPVEGLSLFDEALDNRHMLWNKLVEIDRDFREKSSKIITPIQSDYQVLDQEIKNLQDA
VKAIKCKTRSTAKEETRTIQDTIKELKVKRKEAYQEFKRLKHEAIEREKPLLDCLNNERKEKVKQLRSKSGLH
GFNFDDVTHNIYEVARVKAMKQGTLLRFKRYSKNGKIAVRPYSNSPLYGSDIHRVNTIFYIDPVNQELYNSPI
RGVRKKASVTQCHIRIGSAVKGKPIFVTLPMVYHRPLPMDGKINAINIKRHYIDQKPIYECFITVTYLIEAPA
VNPNSCVAVDLGWRMTKDGLRAAYATDKDHKAIECIVTQRQLNEFDTIRGLSSTRQKHFNDCIHVIKAWIANK
NLPDWLIDAVAYIDKWKSYTHIFKLYNAFLQHEKSGNQEIISYLEAYIERENHLRIWQSNLQDQAIAKRNYEY
QNFAARLANMYDVLVLEKLSITDIVKYQKAIIGSQQSTALDRNRTIVAPYELKTILINAFTSRGKQFVEVNAS
YSTKVCHHCGALEEVHQSSIMHTCTQCHTVWDQDYNACINLLALYDNKVGAY (SEQ ID NO: 169)
>OEED01000500_25
[human metagenome]
MNKVSITKVFKYRCFEPVEGLALFDEALDNRHMLWNKLVEIDRNFREKSSQIITPIQSDYQVLDQKIKNLQDS
IKAIKRKTRSTAKEETRNIQDTIKELKVKRKEAYQEFKRLKHEAIEREKPLLDCLNNERKEQVKQLRSKSGLH
GFNFDDVIHNIYDVARVKAMKQGTLLRFKRYSKNGKIAVRPYSNSPLYGADIHKVNTIFYIEPVNQELYNSPI
RGVRKKASVTQCHIRVGSADKGKPIFVTLPMVYHRPLPMDGKINAINVKRHYIDHKPIYECLITVTYVIEAPA
VNPSSCVAVDLGWRMTKDGLRAAYATDKDNKTMECIVAQRQLNEFDTIRGLSSTRQKHFNDCIHVIKAWIANK
NLPDWLIDAVAYIDKWKSYTHIFELYNAFLQHEKSGNQEIVSYLEAYIERENHLRIWQSNLQDQVIAKRNYEY
QNFAAKLANMYDVLVIEKLSITDIVKHQKAIIGSQQSTALDRNRTIVAPYVLKTILINAFTSRGKQFVEVNAS
YSTKVCHHCGALEEVHQSSIMHICTQCHTIWDQDYNACINLLALYNHDNKVGVSCV (SEQ ID NO: 173)
>OEFT01000529_3
[human metagenome]
MNKVSITKVFKYRCFEPVEGLSLFDEALDNRHMLWNKLVEIDRDFREKSSKIITPIQSDYQVLDQEIKNLQDA
VKAIKCKTRSTAKEETRTIQDTIKELKVKRKEAYQEFKRLKHEAIEREKPLLDCLNNERKEKVKQLRSKSGLH
GFNFDDVIHNIYEVARVKAMKQGILLRFKRYSKNGKIAVRPYSNSPLYGSDIHRVNTIFYIDPVNQELYNSPI
RGVRKKASVTQCHIRIGSAVKGKPIFVTLPMVYHRPLPMDGKINAINIKRHYIDQKPIYECFITVTYLIEAPA
VNPNSCVAVDLGWRMTKDGLRAAYATDKDHKAIECIVTQRQLNEFDTIRGLSSTRQKHFNDCIHVIKAWIANK
NLPDWLIDAVAYIDKWKSYTHIFKLYNAFLQHEKSGNQEIISYLEAYIERENHLRIWQSNLQDQAIAKRNYEY
QNFAARLANMYDVLVLEKLSITDIVKYQKAIIGSQQSTALDRNRTIVAPYELKTILINAFTSRGKQFVEVNAS
YSTKVCHHCGALEEVHQSSIMHICTQCHTVWDQDYNACINLLALYDNKVGAY (SEQ ID NO: 169)
>LAZR01002400_15
[marine sediment metagenome]
MNLGRVYYNSLVEAENERRTTMWGGDRPPSPATHVCKKSCSTCDKAESKKRKPRKHECKKFCPVCRAHYKALR
KQYRSEPPLDVKPFRKKAAEGGLYWGTYLVIEQDFSAAWKETESFSLVKFRSWRQGDMCAVQIQRDKDPDRMF
LIKSAPDPRKKKQQRYTLRLRVGSKGQAPVWAEPLPFEMHRPLQGTATWVKIARKYVADRVIWSVQFTRRDIP
ERKDNAERGAVAIDVGWRKTDDGMRIAYARGDDGAEYELVLPPKWMKHADQADRIRSARDQNLVELQKQERFW
SVILAVCGFSNKKLFARLKSTLSVRRVAKPGEHTKWIKKERHLWQYEAGCRNRSVTRRRNDVRVWLRDLRRRY
AHAVIKDSCHKKMKENKTSLPKPARRQGHHAAPGEVIEEITRVFGRITGVSVVCAVDTTNHCPACSFVNSYGP
ERVVTCGGCGVVEDRDRVSTQNMMNMYAIGNVRNPTTRKSTPRFAKKHKDPEAP (SEQ ID NO: 174)
>LAZR01002400_19
[marine sediment metagenome]
MTKVYKYGALPGGDTLCAQMNLGRVYYNSLVEAENERRTTMWGGDRPPSPATHVCKKSCSTCDKAESKKRKPR
KHECKKFCPVCRAHYKALRKQYRSEPPLDVKPFRKKAAEGGLYWGTYLVIEQDFSAAWKETESFSLVKFRSWR
QGDMCAVQIQRDKDPDRMFLIKSAPDPRKKKQQRYTLRLRVGSKGQAPVWAEPLPFEMHRPLQGTATWVKIAR
KYVADRVIWSVQFTRRDIPERKDNAERGAVAIDVGWRKTDDGMRIAYARGDDGAEYELVLPPKWMKHADQADR
IRSARDQNLVELQKQERFWSVILAVCGFSNKKLFARLKSTLSVRRVAKPGEHTKWIKKERHLWQYEAGCRNRS
VTRRRNDVRVWLRDLRRRYAHAVIKDSCHKKMKENKTSLPKPARRQGHHAAPGEVIEEITRVFGRITGVSVVC
AVDTTNHCPACSFVNSYGPERVVTCGGCGVVEDRDRVSTQNMMNMYAIGNVRNPTTRKSTPRFAKKHKDPEAP
(SEQ ID NO: 175)
>FLSK01003024_2
[metagenome]
MNKVSITKVFKYRCFEPVEGLSLFDEALDNRHMLWNKLVEIDRDFREKSSKIITPIQSDYQVLDQEIKNLQDA
VKAIKCKTRSTAKEETRTIQDTIKELKVKRKEAYQEFKRLKHEAIEREKPLLDCLNNERKEKVKQLRSKSGLH
GFNFDDVTHNIYEVARVKAMKQGTLLRFKRYSKNGKIAVRPYSNSPLYGSDIHRVNTIFYIDPVNQELYNSPI
RGVRKKASVTQCHIRIGSAVKGKPIFVTLPMVYHRPLPMDGKINAINIKRHYIDQKPIYECFITVTYLIEAPA
VNPNSCVAVDLGWRMTKDGLRAAYATDKDHKAIECIVTQRQLNEFDTIRGLSSTRQKHFNDCIHVIKAWIANK
NLPDWLIDAVAYIDKWKSYTHIFKLYNAFLQHEKSGNQEIISYLEAYIERENHLRIWQSNLQDQAIAKRNYEY
QNFAARLANMYDVLVLEKLSITDIVKYQKAIIGSQQSTALDRNRTIVAPYELKTILINAFTSRGKQFVEVNAS
YSTKVCHHCGALEEVHQSSIMHICTQCHTVWDQDYNACINLLALYDNKVGAY (SEQ ID NO: 169)
>OFLM01000072_9
[metagenome]
MNKVSITKVFKYRCFEPVEGLALFDEALDNRHTLWNQLVEIDRNFREKSSQIITPIQSDYQVLDQEIKNLQDS
IKAIKRKTRSTAKEETRIIKDTIKELKVKRKEAYQEFKRLKHEAIEREKPLLDCLNNERKEQVKQLRSKSGLH
GFNFDDVIHNIYDVARVKAMKQGTLLRFKRYSKNGKIAVRPYSNSPLYGADIHKVNTIFYIEPVNQELYNSPI
RGVRKKASVTQCHIRVGSADKGKPIFVTLPMVYHRPLPMDGKINAINVKRHYIDHKPIYECLITVTYVIEAPA
VNPSSCVAVDLGWRMTKDGLRAAYATDKDNKTMECIVAQRQLNEFDTIRGLSSTRQKHFNDCIHVIKAWIANK
NLPDWLIDAVAYIDKWKSYTHIFELYNAFLQHEKSGNQEIVSYLEAYIERENHLRIWQSNLQDQVIAKRNYEY
QNFAAKLANMYDVLVIEKLSITDIVKHQKAIIGSQQSTALDRNRTIVAPYVLKTILINAFTSRGKQFVEVNAS
YSTKVCHHCGALEEVHQSSIMHICTQCHTIWDQDYNACINLLALYNHDNKVGVSCV (SEQ ID NO: 176)
>OFLO01000090_50
[metagenome]
MNKVSITKVFKYRCFEPVEGLALFDEALDNRHTLWNQLVEIDRNFREKSSQIITPIQSDYQVLDQEIKNLQDS
IKAIKRKTRSTAKEETRIIKDTIKELKVKRKEAYQEFKRLKHEAIEREKPLLDCLNNERKEQVKQLRSKSGLH
GFNFDDVIHNIYDVARVKAMKQGTLLRFKRYSKNGKIAVRPYSNSPLYGADIHKVNTIFYIEPVNQELYNSPI
RGVRKKASVTQCHIRVGSADKGKPIFVTLPMVYHRPLPMDGKINAINVKRHYIDHKPIYECLITVTYVIEAPA
VNPSSCVAVDLGWRMTKDGLRAAYATDKDNKTMECIVAQRQLNEFDTIRGLSSTRQKHFNDCIHVIKAWIANK
NLPDWLIDAVAYIDKWKSYTHIFELYNAFLQHEKSGNQEIVSYLEAYIERENHLRIWQSNLQDQVIAKRNYEY
QNFAAKLANMYDVLVIEKLSITDIVKHQKAIIGSQQSTALDRNRTIVAPYVLKTILINAFTSRGKQFVEVNAS
YSTKVCHHCGALEEVHQSSIMHICTQCHTIWDQDYNACINLLALYNHDNKVGVSCV (SEQ ID NO: 176)
>OFLU01000140_22
[metagenome]
MNKVSITKVFKYRCFEPVEGLALFDEALDNRHTLWNKLVEIDRDFREKSSQIITPIQSDYQVLDQEIKNLQDS
IKAIKRKTRSTAKEETRNIQDTIKELKVKRKEAYQEFKRLKHEAIEREKPLLDCLNNERKEKVKQLRSESGLH
GFNFDDVIHNIYDVARIKAMKQGTLLQFKRYSKNGKIAVRPYSSSPLYGSDIHRANTIFYIEPVNQELYNSSI
RGVRKKASVTRCHIRVGSADKGKPIFVTLPMVYHRPLPMDGKINAINVKRHYIDHKPIYECLITVIYAIEAPT
INPNSCVAVDLGWRMTKDGLRAAYATDTDDKTIECIVTQRQLNEFDTIRGLSSTRQKHFNDCIHVIKAWMANK
NLPDWLTDAVTYIDKWKSYKHIFELHDAFLQHKKSGNQEIVSYLEAYIERENHLRTWQSNLQDQVIARRNYEY
QNFAAKLANMYDVLVLEKLSITDIVKHQKAIIGSQQSTALDRNRTIVAPYELKKILINAFTNRGKQFVEVNAS
YSTKVCHHCGALEEVHQSSIMHTCTQCHTVWDQDYNACINLLALYNHDNKVGVSYV (SEQ ID NO: 177)
>OFLV01000230_3
[metagenome]
MNKVSITKVFKYRCFEPVEGLALFDEALDNRHTLWNKLVEIDRDFREKSSQIITPIQSDYQVLDQEIKNLQDS
IKAIKRKTRSTAKEETRNIQDTIKELKVKRKEAYQEFKRLKHEAIEREKPLLDCLNNERKEKVKQLRSESGLH
GFNFDDVIHNIYDVARIKAMKQGTLLQFKRYSKNGKIAVRPYSSSPLYGSDIHRANTIFYIEPVNQELYNSSI
RGVRKKASVTRCHIRVGSADKGKPIFVTLPMVYHRPLPMDGKINAINVKRHYIDHKPIYECLITVIYAIEAPT
INPNSCVAVDLGWRMTKDGLRAAYATDTDDKTIECIVTQRQLNEFDTIRGLSSTRQKHFNDCIHVIKAWMANK
NLPDWLTDAVTYIDKWKSYKHIFELHDAFLQHKKSGNQEIVSYLEAYIERENHLRTWQSNLQDQVIARRNYEY
QNFAAKLANMYDVLVLEKLSITDIVKHQKAIIGSQQSTALDRNRTIVAPYELKKILINAFTNRGKQFVEVNAS
YSTKVCHHCGALEEVHQSSIMHTCTQCHTVWDQDYNACINLLALYNHDNKVGVSYV (SEQ ID NO: 177)
>OGCY01000078_30
[metagenome]
MNKVSITKVFKYRCFEPFEGLELFNEALDNRHTLWNKLVEIDRDFREKSSQIITPIQSEYQILDQEIKNLQDS
IKAIKRETRSTAKEETRNIQDTIKELKVKRKEAYQEFKRLKHEAIEREKPLLDCLNNERKEKVKQLRSESGLH
GFNFDDVIHNIYDVARIKAMKQGTLLQFKRYSKNGKIAVRPYSSSPLYGSDIHRVNTIFYIEPVNQELYNSSI
RGVRKKASVTRCHIRVGSADKGKPIFVTLPMVYHRPLPMDGKINAINVKRHYIDHKPIYECLITVIYAIEAPT
INPNSCVAVDLGWRMTKDGLRAAYATDTDDKTIECIVTQRQLNEFDTIRGLSSTRQKHFNDCIHVIKAWMANK
NLPDWLTDAVAYIDKWKSYKHIFDLYDAFLQHKKSGNQEIVSYLEAYIERENHLRTWQSNLQDQVIARRNYEY
QNFAAKLANMYDVLVLEKLSITDIVKHQKAIIGSQQSTALDRNRTIVAPYELKTILINAFTNRGKQFVEVNAS
YSTKVCHHCGALEEVHQSSIMHICTQCHTVWDQDYNACINLLALYNHDNKVGVSYV (SEQ ID NO: 178)
>OGJO01000473_2
[metagenome]
MNKVSITKVFKYRCFEPVEGLSLFDEALDNRHMLWNKLVEIDRDFREKSSKIITPIQSDYQVLDQEIKNLQDA
VKAIKCKTRSTAKEETRTIQDTIKELKVKRKEAYQEFKRLKHEAIEREKPLLDCLNNERKEKVKQLRSKSGLH
GFNFDDVTHNIYEVARVKAMKQGTLLRFKRYSKNGKIAVRPYSNSPLYGSDIHRVNTIFYIDPVNQELYNSPI
RGVRKKASVTQCHIRIGSAVKGKPIFVTLPMVYHRPLPMDGKINAINIKRHYIDQKPIYECFITVTYLIEAPA
VNPNSCVAVDLGWRMTKDGLRAAYATDKDHKAIECIVTQRQLNEFDTIRGLSSTRQKHFNDCIHVIKAWIANK
NLPDWLIDAVAYIDKWKSYTHIFKLYNAFLQHEKSGNQEIISYLEAYIERENHLRIWQSNLQDQAIAKRNYEY
QNFAARLANMYDVLVLEKLSITDIVKYQKAIIGSQQSTALDRNRTIVAPYELKTILINAFTSRGKQFVEVNAS
YSTKVCHHCGALEEVHQSSIMHTCTQCHTVWDQDYNACINLLALYDNKVGAY (SEQ ID NO: 169)
>OGJT01000109_37
[metagenome]
MNKVSITKVFKYRCFEPVEGLALFDEALDNRHTLWNKLVEIDRDFREKSTQIITPIQSDYQVLDQEIKNLQDS
IKAIKRKTRSTAKEETRNIQDTIKELKVKRKEAYQEFKRLKHEAIEREKPLLDCLNNERKETVKQLRSESGLH
GFNFDDVIHNIYDVARIKAMKQGTLLQFKRYSKNGKIAVRPYSSSPLYGSDIHRINTIFYIEPVNQELYNSSI
RGIRKKASVTRCHIRVGSADKGKPIFVTLPMVYHRPLPMDGKINAINVKRHYIDHKPIYECLITVIYAIEAPT
INPNSCVAVDLGWRMTKDGLRAAYAIDTDDKTIECIVTQRQLNEFDTIRGLSSTRQKHFNDCIHVIKAWMANK
NLPDWLTDAVAYIDKWKSYKHIFDLYDAFLQHKKSGNQEIVSYLESYIERENHLRTWQSNLQVQVIARRNYEY
QNFAAKLANMYDVLVLEKLSITDIVKHQKAIIGSQQSTALDRNRTIVAPYELKKILINAFTNRGKQFVEVNAS
YSTKVCHHCGALEEVHQSSIMHTCTQCHTVWDQDYNACINLLALYNHDNKVGVSNV (SEQ ID NO: 179)
>OGJZ01005194_5
[metagenome]
MNKVSITKVFKYRCFEPVEGLALFDEALDNRHTLWNKLVEIDRDFREKSSQIITPIQSDYQVLDQEIKSLQDS
IKAIKRKTRSTAKEETRNIQDTIKELKVKRKEAYQEFKRLKHEAIEREKPLLDCLNHERKEKVKQLRSESGLH
GFNFDDVIHNIYDVARIKAMKQGTLLRFKRYSKNGKIAVRPYSSSPLYGSDIHRVNTIFYIEPVNQELYNSSI
RGVRKKASVTRCHIRVGSADKGKPIFVTLPMVYHRPLPMDGKINAINVKRHYIDHKPIYECLITVTYAIKSPA
VNPDSCVAVDLGWRMTKDGLRAAYATDTDNKTMECIVAQRQLNEFDTIRGLSSTRQKHFNDCIHVIKAWMANK
NLPDWLTDAVAYIDKWKSYKHIFDLYDAFLQHKKSGNQEIVSYLEAYIERENHLRIWQSNLQDQVIARRNYGY
QNFAAKLANMYDVLVLEKLSITDIVKHQKAIIGSQQSTALDRNRTIVAPYELKTILINAFTNRGKQFVEVNAS
YSTKVCHHCGALEEVHQSSIMHTCTQCHTVWDQDYNACINLLALYNHDNKVGVSYV (SEQ ID NO: 180)
>OGKO01001669_8
[metagenome]
MNKVSITKVFKYRCFEPVEGLALFDEALDNRHTLWNKLVEIDRDFREKSSQIITPIQSDYQVLDQEIKNLQDS
IKAIKRKTRSTAKEETRNIQDTIKELKVKRKEAYQEFKRLKHEAIEREKPLLDCLNNERKEKVKQLRSESGLH
GFNFDDVIHNIYDVARIKAMKQGTLLQFKRYSKNGKIAVRPYSSSPLYGSDIHRVNTIFYIESVNQELYNSPI
RGVRKKASVTRCHIRVGSADKGKPIFVTLPMVYHRPLPMDGKINAINVKRHYIDHKPIYECLITVTYAIEAPT
INPNSCVAVDLGWRMTKDGLRAAYATDTDDKTIECIVTQRQLNEFDTIRGLSSTRQKHFNDCIHVIKAWMANK
NLPDWLTDAVAYIDKWKSYKHIFDLYDAFLQHKKSGNQEIVSYLEAYIERENHLRTWQSNLQDQVIARRNYEY
QNFAAKLANMYDVLVLEKLSITDIVKHQKAIIGSQQSTALDRNRTIVAPYELKKILINAFTNRGKQFVEVNAS
YSTKVCHHCGALEEVHQSSIMHTCTQCHTVWDQDYNACINLLALYNHDNKVGVSYV (SEQ ID NO: 181)
>OFCI01000292_37
[metagenomes unclassified sequences.]
MWYAHRYGNVLVEIERARRAAVRLAYGPLATFEHAAKEAGTVVRDAREAIKRARAEHRARVETDAMKLALSSA
REAEREAKRALFEARRQLRESGAVDAALADIEARAGELRRGARALSGVHWGTYSLIEAAHDASRKMPLYDGVE
PNDPRFARWEHEGQVGIQVHQKGSTGTGMVAEELHAGIGGEWLRVERVHDTRQGRRAGTRARLTMRIGTSDVD
GTPIVAAWPMVMHRAVPPGAIVRRATVSLRRRGPREEWSVELTIQVPSTIAPEERQGHVAINVGWRSMGDTIR
VASWVGSDGQKGELHLSKRTIEGLRKPEGLRSTRDKNFNDARNALLLALAGLNVPEWYTLRAKALSQWRSPQR
LAALATEWKTKRFAGDESAYLALETWRYHDHHLWAWEASQSVGSHRHRREVYRVFGSQLAKRYRTLVLADFDK
RVVAIRPAVGDANDKTQNETARSNRQLASTSELEREAANAFTSRGGTAEYLSAVDITHTCADCGALSTFDAAE
RIHAACSSCGVVFDQDENAARVLCERWRDGEKVGVARVAEPQEKVGSKWQRAKARKEERQAARKAVASAAE
(SEQ ID NO: 182)
>3300006048|Ga0075363_100000001_25
[plants-endosphere-populus endosphere]
MAFGNKSKPTRKYNYGCRGFLSGPREINPDGTKALRQRFDGHDLAVTQMKLAHQFQNKLVEIERARREAIDPI
LVRHFPALTTLHNAAQEQQERLQELRDELSQSNSQNRQLMSDPELVEQINAQKRVVSQAWEFYSDQRDAAFAD
PKVKADLKDNDKSFEQRKADARNAAVEGGLYWATSLQVVGRVKRTGPPPKFKSWRGEEVISVQFQRKPDKTSP
KEPVLDSKGNPKIHPRSKKPTFAHVGGSSLRTCDVFTPNTNCWIERTYQPPLTAPHPKYVVIHFRVSSDEKGK
PVMASIPAVMSRPLPEDGEVKWVHLSRRKIGTHYRWDVQFDIARDAWTYHPAGQDRAQEGTVAVALGWRLIDG
EIRVIEWVGDDGVTGTVRIPKELVEGWSYLDTLQSIRDTLFEAERAELVDWFVNYPNPLPEEWTERAQTLIQW
RSADRFMWLIWWWKDHRIPGDEEIFQRMWGRIQLNPITGRNQYTGGRLQSKHLCDWRAHKRDKIKNWRKDFFR
KVAIDLSYQYKDVVIAEIDWNKLAENPEVENGNDIVNKRYRALSSCAQLRDEITRYMNEVTESARNIVTTCCQ
CGESCDHPKSGRWIRCESCGGEKRDRAVNAATNLLNRALGASGAKVPARV (SEQ ID NO: 183)
>3300006048|Ga0075363_100000001_20
[plants-endosphere-populus endosphere]
MVAAKISHLLEFPSMAFGNKSKPTRKYNYGCRGFLSGPREINPDGTKALRQRFDGHDLAVTQMKLAHQFQNKL
VEIERARREAIDPILVRHFPALTTLHNAAQEQQERLQELRDELSQSNSQNRQLMSDPELVEQINAQKRVVSQA
WEFYSDQRDAAFADPKVKADLKDNDKSFEQRKADARNAAVEGGLYWATSLQVVGRVKRTGPPPKFKSWRGEEV
ISVQFQRKPDKTSPKEPVLDSKGNPKIHPRSKKPTFAHVGGSSLRTCDVFTPNTNCWIERTYQPPLTAPHPKY
VVIHFRVSSDEKGKPVMASIPAVMSRPLPEDGEVKWVHLSRRKIGTHYRWDVQFDIARDAWTYHPAGQDRAQE
GTVAVALGWRLIDGEIRVTEWVGDDGVTGTVRIPKELVEGWSYLDTLQSIRDTLFEAERAELVDWFVNYPNPL
PEEWTERAQTLIQWRSADRFMWLIWWWKDHRIPGDEEIFQRMWGRIQLNPTTGRNQYTGGRLQSKHLCDWRAH
KRDKIKNWRKDFFRKVAIDLSYQYKDVVIAEIDWNKLAENPEVENGNDIVNKRYRALSSCAQLRDEITRYMNE
VTESARNIVTTCCQCGESCDHPKSGRWIRCESCGGEKRDRAVNAATNLLNRALGASGAKVPARV (SEQ ID
NO: 184)
>3300006048|Ga0075363_100000020_49
[plants-endosphere-populus endosphere]
MIVYKYGALKPKVIGGTFEDLLQYQRHSNAFYNALIEIERWRIAARDIVELAQSAPLSDEQKTEHRLAYNAAC
RAAGAATPIGWGQKQAVTEMVAAAMKTRRSDEFKARQRASKKGYDFLKRVMTCARPRHRRFDGEGILAATVQG
ATGLKASAVLTKPGPVQISGDGKHRTVTLRLREGLSLEVPIVYHRPLPERAEKEGVPYDVRVIFARLVIDRIG
DRWTYSVHLTIDAAPRVHVAQGGLGRCAVNFGWRRVPGGIRVAYAVDDDGNETSCVFPDALLGRQKHAESLRS
LADEIAAAYLGDAARRTKARCSALADPDAIHRELGREWFTMEQAAKRDGTDAEHWARRDRHLYQWERDEYASV
LRARREIYRLWARKLAASYDSVIIEAFDMRSVVKRTPSEDDIPAARHYRFLVGPHCLRLEIQSVFGARCEVLK
PAKRTLTCHACGALCKWDKARELRHDCESCGAAWDQDANNAKNQLLDAAE (SEQ ID NO: 185)
>3300006178|Ga0075367_10000108_6
[plants-endosphere-populus endosphere]
MAFGNKSKPTRKYNYGCRGFLSGPREINPDGTKALRQRFDGHDLAVTQMKLAHQFQNKLVEIERARREAIDPI
LVRHFPALTTLHNAAQEQQERLQELRDELSQSNSQNRQLMSDPELVEQINAQKRVVSQAWEFYSDQRDAAFAD
PKVKADLKDNDKSFEQRKADARNAAVEGGLYWATSLQVVGRVKRTGPPPKFKSWRGEEVISVQFQRKPDKTSP
KEPVLDSKGNPKIHPRSKKPTFAHVGGSSLRTCDVFTPNTNCWIERTYQPPLTAPHPKYVVIHFRVSSDEKGK
PVMASIPAVMSRPLPEDGEVKWVHLSRRKIGTHYRWDVQFDIARDAWTYHPAGQDRAQEGTVAVALGWRLIDG
EIRVTEWVGDDGVTGTVRIPKELVEGWSYLDTLQSIRDTLFEAERAELVDWFVNYPNPLPEEWTERAQTLIQW
RSADRFMWLIWWWKDHRIPGDEEIFQRMWGRIQLNPTTGRNQYTGGRLQSKHLCDWRAHKRDKIKNWRKDFFR
KVAIDLSYQYKDVVIAEIDWNKLAENPEVENGNDIVNKRYRALSSCAQLRDEITRYMNEVTESARNIVTTCCQ
CGESCDHPKSGRWIRCESCGGEKRDRAVNAATNLLNRALGASGAKVPARV (SEQ ID NO: 183)
>3300006178|Ga0075367_10000108_6
[plants-endosphere-populus endosphere]
MVAAKISHLLEFPSMAFGNKSKPTRKYNYGCRGFLSGPREINPDGTKALRQRFDGHDLAVTQMKLAHQFQNKL
VEIERARREAIDPILVRHFPALTTLHNAAQEQQERLQELRDELSQSNSQNRQLMSDPELVEQINAQKRVVSQA
WEFYSDQRDAAFADPKVKADLKDNDKSFEQRKADARNAAVEGGLYWATSLQVVGRVKRTGPPPKFKSWRGEEV
ISVQFQRKPDKTSPKEPVLDSKGNPKIHPRSKKPTFAHVGGSSLRTCDVFTPNTNCWIERTYQPPLTAPHPKY
VVIHFRVSSDEKGKPVMASIPAVMSRPLPEDGEVKWVHLSRRKIGTHYRWDVQFDIARDAWTYHPAGQDRAQE
GTVAVALGWRLIDGEIRVTEWVGDDGVTGTVRIPKELVEGWSYLDTLQSIRDTLFEAERAELVDWFVNYPNPL
PEEWTERAQTLIQWRSADRFMWLIWWWKDHRIPGDEEIFQRMWGRIQLNPTTGRNQYTGGRLQSKHLCDWRAH
KRDKIKNWRKDFFRKVAIDLSYQYKDVVIAEIDWNKLAENPEVENGNDIVNKRYRALSSCAQLRDEITRYMNE
VTESARNIVTTCCQCGESCDHPKSGRWIRCESCGGEKRDRAVNAATNLLNRALGASGAKVPARV (SEQ ID
NO: 184)
>3300006195|Ga0075366_10000160_13
[plants-endosphere-populus endosphere]
MAFGNKSKPTRKYNYGCRGFLSGPREINPDGTKALRQRFDGHDLAVTQMKLAHQFQNKLVEIERARREAIDPI
LVRHFPALTTLHNAAQEQQERLQELRDELSQSNSQNRQLMSDPELVEQINAQKRVVSQAWEFYSDQRDAAFAD
PKVKADLKDNDKSFEQRKADARNAAVEGGLYWATSLQVVGRVKRTGPPPKFKSWRGEEVISVQFQRKPDKTSP
KEPVLDSKGNPKIHPRSKKPTFAHVGGSSLRTCDVFTPNTNCWIERTYQPPLTAPHPKYVVIHFRVSSDEKGK
PVMASIPAVMSRPLPEDGEVKWVHLSRRKIGTHYRWDVQFDIARDAWTYHPAGQDRAQEGTVAVALGWRLIDG
EIRVTEWVGDDGVTGTVRIPKELVEGWSYLDTLQSIRDTLFEAERAELVDWFVNYPNPLPEEWTERAQTLIQW
RSADRFMWLIWWWKDHRIPGDEEIFQRMWGRIQLNPTTGRNQYTGGRLQSKHLCDWRAHKRDKIKNWRKDFFR
KVAIDLSYQYKDVVIAEIDWNKLAENPEVENGNDIVNKRYRALSSCAQLRDEITRYMNEVTESARNIVTTCCQ
CGESCDHPKSGRWIRCESCGGEKRDRAVNAATNLLNRALGASGAKVPARV (SEQ ID NO: 183)
>3300009500|Ga0116229_10010095_9
[plants-peat moss-host associated]
MTTLVYQFHLDPPVSGERAARQQMLAAHRYANDLIAIERGRRDALRAVHDTPAVREAEVLLKAATRSTRKAAV
KALWAARREAERIASEVDETLPEVAAAKAALDALPKDAPARVRSVARQTLRAARAEAGDALARIQIFDEALRR
GARALTTAHWGTYLSIEASADQARKAPLYADDALTPASPRFRFGARRGYLDESDARSVWWCARSQVGMHVQGR
VCRTSGVFAGRDAWVRLEDAEPISHDHNTRRAILALRLDVDTWVRWPIRMHREIPDAARWSWVRVSCRPQQGA
RGKELWSVEITVDDTAPRPRELAADTLRGAVAVELLWSPLDDGTMRVARWLDSEGKRGEIVLPRELVRGLGEI
PSGIRSVRDQLLNDLRPKLTRALRECTETMPTWLREAGATLHLWKSPSRFVDLARRWRASKCDAARAAYELLD
AWELRDTHLDDYENGTRARSLRRRREVYRVLAARWAQSYATVLVPDRDLSREARWGEESERRFLASPQELRDC
LRKAFGDGAVDVPWRGPHGVVDDGDEDADVPEWLEKAIEQWRDEEKSGSARKGGKEKKNGEVAMSAWARRQAA
ARDRDLGKETARKAANNDAE (SEQ ID NO: 186)
>3300009701|Ga0116228_10018148_5
[plants-peat moss-host associated]
MKIVYRYGLRAPIGHTPTNPTSKEVCKCPVCEQLFLAHSYANTLTEIERGRRAAVRALHAQVGDTGALELAVT
EANQACEKAASNIKRLRAQAFSVLAQRGHTEGAAKRGTRVTPPEMARELADARKRKQEATTRLVEHRRKIRED
PAMIVGEHEITERAKELQRSARKYAGVYWGTYLLVERAHGASIASLPLYDGAGPNDPRFDRYRGEGSLAVQIQ
QQTGDPAFTVEQLSGSDSRVQIQKEAGRLHTRLKRDEEGRVVREGPLVEMRRGNCIVARPQAVRETYSMVGDT
MLRLRIGSENRAPVWAEWPLKLSKPLPKGAIVSWVTVTKRMTGPREEWSVQFTLDTVDEVVQRDVDEEDARVV
AVNFGWRLMGEELRVAYWRSETGRNGDLRLPASMLAIRAEAEEVQSRRDKEFDETRARLCKWLASTEVPTWLR
DATKALAQWRSQARLVHLAKGWRVQRFAGDQEAFETLEAWRYHEHHLWQWESSVRATAVRSRDDLYKRWAKIL
ADNFDVLVIAGDFDVRKVAERPEVDEEIQGPAAAATSRQFAAPGRLREILCHAFTKAGSKIAKERGADITRTC
QVCGLVEEFDAARSVIRATPCSGCNATWDQDDNACIELLARYDRTCEKSKNTSSDDGARAEPKNETKKAAGSH
WDRARQKKVEKLKKVEAARQALENTG (SEQ ID NO: 187)
>3300005577|Ga0068857_100000008_197
[plants-rhizoplane-corn rhizosphere]
MEPVKKSNARKTSTSETKVYSYGAFLPKESEQIKLINDQLYFAHKYRNKLVEIERKRRNRFRNLRKLMSPELR
QLENDLLLTEEKIIELRKSFGGRAENSLDPKFPKKNRQLTPQAVEIKDLKLKKKDLSAKIKSIHTQLNLDYFK
EADSKFSLLKKERLEQKAKELNKDSLGPNDVNRHNVVNNLYKEMIDGGNRFWAIKAKISKSAEASNKRARSNC
KCSSGTYVSIEEAAKQSFSNSKFEPKFKSFDGSGKIGMQLTQNKGLSIKDALSGSSPVLKIDLHPEVYLRQNK
KKNKVLATARIKLFGTEKTGKFVDIPFIMHRQMPEDATIKWVFLVVSKIGYRSIYNIQFTIESNSFTQPSAIR
PDDVAINLGWKVNDQTDDITVATSFDGKNYNELILPSKMRANIVYKETLISHADKHFDSVKKDVSKWLKNSNL
DECITKYFTNLPQWRSHKKLLFVSKELAKVFLPDNTWYDLWKKWKTHCKENKPWKNCSDKDDLFTTLDNTIQW
CKDNSIDDPNVQMAFYLKTWAEKEIHLINWARGIESKLRKHRKEIYRCFAKKLSSTYGKVIVENWDKSKTAET
PDVENDNRTKQEENANAVRQFVGVSVLTDALKQKFGKDFCEENAKNISKEHFKCGGELINQKELSDVHCKKCN
KSVNVNYNAAAHLFDRHGERSGAVKLPGTARKTRKSPELLA (SEQ ID NO: 188)
>3300005338|Ga0068868_100030384_5
[plants-rhizoplane-miscanthus rhizosphere]
MRIYAYGARPPVENAELVFEQLRLAHAYQCALVAIERRRRVVVDRLYQSACPAEWNAYEAATARVQEIIPRMR
MTRTRPGDMLPPDMEMQVEEREIVKQIKADLAAAREAEQVARQAWYAAKKMATPRLRARLRMCDRGAYARAKR
AYNLASAVGLAWGTRLKIAESVERAGKAAAKHGTLPHFPRFDGGGTIAVQIQGGLDAEAVFGGVDTRFRLNVV
DAATWNALQGKSATQSVKKSGRVVDLPQPIEGSRRSTLRRGPIARLRIGSEGRQPIWAAWPVTLRRGLPLKAL
IKWVQIHARKIGSRTEWQLLVTVDDAKPAVHAEGPILAVNLGWRNLEDGGLRVGYAVGSDGREEEVRVPPRYT
SGVAHVDSIRSIRDKLFEAVKEFLSDWSDESPRPPDWLVDATRHIDQWRSPARLVTLLREWERKRFVGDRKTW
ERLSAWKTKNAHLRFWECDERRKLLRMRLDFYRCLAARWASQYARVVVTDMDLRDFAKLPEPEEAADTEGQTQ
RRSRVLAAPSELRGAIKNACSTRGTGYEEKKAAWKTQTCNACGVVFAFAAKQDLLHICECGARWDQDANHCRN
LLASGPVLHGAMGSLAPTGKQMESTDRPAVDGRWKKRRSRTTVEALKKTAKSA (SEQ ID NO: 189)
>3300005841|Ga0068863_100041042_2
[plants-rhizoplane-switchgrass rhizosphere]
MPRARKEKSPTKIYTYGLLPPEHGGEDLMRMLRAGHNYRNALLEVERDRLAETEDFWAKRGRYTELVARVREL
EAVRFPRKDDPRRQAHYDLIDDLREKVREKREATIQGSLPAEEGRRRLRSRELKAEAKKRGETLTKEQMTRLL
DREPGCVSVRRKAQLDYEAQSRARGVEPSPKGMVAHLRALGLNTITQEIDDRATQKAKKAREHFKVYYGTYLL
IEAQVERALEKTQFPRFKRWTGEGRVGAPVDTNFGLSVDSIHDCQFDSKHGWEENRGNTVLQIDPVGVSCAKG
FHTRARVCVDSRGRSGSKRLSVWVDFRINYHRELPRGAKICGAWINIYTLGTRVKYELQLQVQDDSFQVQPRH
GTGVAAINLGYRSSGRVAYVLSEDGKGRELLVSPRIEASIGRADTSRSDRENSANRMCDMLLGWSSELGFPEA
FLVGDGESKIDTWSGSVTRRSRSLSTRISALKDAREESLSNKLRGILGTWAKLRQDKQTRPSDEATYAAFVEW
FHQDKIYQNNEAFTRSGARNYRDQVVRDWAHELCDRYEMLLVDGTDYAKLKMRPKDKSVMPIENQTEIAHRRD
NFAPGNLRSIIEEVARARGVTVDRHDPSGLTQRHHACGWDEPWDAMPRIEHKCAGCGETFDQDANFCVGLFER
FRGILPPAPARSPRTSRKNRSSSGSERAGGGQEAAE (SEQ ID NO: 190)
>3300013306|Ga0163162_10000022_153
[plants-rhizoplane-switchgrass rhizosphere]
MNRVYEYGLLDPVVNAQIVEDQLRAAHRYRNLLVEIERERRTRVREILSSHADAAPLAEDVARLTVELEQAQA
KIKQVRAVSRRRSETTDDRMAVRDVTTRLKAAREQLKIVKAAVAQDPSCQEALAQAEQRCHDRRIEERARCGV
FWGTYLLIEEDVDRARKGKMDPKFVRFTGEGRVSVQLQGGLEWGGIAEDTRIQIRDAPDPRQGRRAGTRKWLR
LRVGSTGRDPIWAEWPLILHRPLPEGAVIKRATVTRWRRDCRRWEWRLQLILDVSRCVGTKPRGTEGACALNL
GWAKTERGLRVGFVVGSDGERTEIVLPGSILDRLDKANAIRAQRDQNLDVMKPLLAAWIAAHPLPEVLHAKIE
HLHAWRSADRFFGLARLWRQHRFDGDTEGYELLESWRYRDEHLQRYEAGMRRGALGHRREVYRLVGAALSRRY
RMLIVDDTDLRTFQRSPAPESDRVEFDAVKRSQHVAAPSDLRMQLANAFGEDGVAELSAVDVTRRCHACLTLN
DWDRASSGREHACVGCQQVWDQDVNACLNLLREWRTVAPGWEAARVAKASNRQASRAERLQQARRKKKPAEAI
AG(SEQ ID NO: 191)
>3300009148|Ga0105243_10000126_60
[plants-rhizosphere-miscanthus rhizosphere]
MPVIVYEYGLSPPKVNAALVEEQFRLAHKYRNMLTEIELERRTKIRAIMASHPDMVPFETELAEVQAEIEKLR
GEINAIRMAARKRASTPEQSRRIKTLAARARELRTEIKERRKRVAAELAPDLKAIQDAAVQRRKDERAKSGVY
WGTYLLQEAAADQARDQPMPPKFTRWNGDGRVSVQIQQGLAKEGLWGESRQVQIATRIDSLVYDHEVTRRGDR
RRLYRTTLRMRVGSTDRQPVWAEWGIAMHRPIPDGAVIKVVTVSRRRCNSTQWWWRVQFTLDTTDCKPRQRPE
YGVVACNLGFSQTDSGAIRAGYLVGDDGFEQEILVAKSDLYRGRDLTPEQKQKAMTYVRDCLAESSEIRGARD
KSLAEFKTRFLEWYQIAKATTFGEDAIPEWFRDRMEHFHMWRSPARVREMMLHWASNRWAELDDPESRWPDSR
GFEMMSTWVDEDTKAEVKESSLRNKALGDRREAYRIVAATLAKRYKTLLIDDTNLKHLQDGPEPEDAEGDIPA
VKYQQRLAAGSELRQVLINAFGGTNVVKMKPSNMTVTCSGCGARDVSWDRADGFRKHRCSACREIWDQDANFC
RNLLKEYARGEAPEAKVAKPSRSQRFHESRKKKAAADQQEQG (SEQ ID NO: 192)
>3300006846|Ga0075430_100000057_67
[plants-rhizosphere-populus rhizosphere]
MATIVYRYGVRTRTETGRYDLPAEVWQQIHLSHRLRNALVEVEHRHDEAMRDLWSAHPQVAEVEQRLAAAEQM
VAELIDQARLEHSQDRTTATRRGTATNLREARRAVRDARAARRAAIGEAYPVVKPGIEAVRAARKAAIKDLYR
EYCQDGDLYWATYNAVVADHRIAVQAVERKRRQGQAAQLRYQRWDGTGTISVQLQRQAGQPARSPELLASGDG
QWRNVLQVRPWMPPEQFDGLTRGERKRHGRGEAVWSVGGGRTVTLPIQVHRMMPADADVCEAQLVVTRTGAHW
SAALCVTVRLPDPDPVEGRSPLALHCGWRHRPDGSVRVGTWASPEPLVPPANLADVLAAHDSGRWGEIVIPAS
WLELAGRPAALRSRRDLALEPVQRKLAEWLDQNPQPDGDDGRPGLTGGDVRRWRSANRFAALAIRWRDTPPPG
EGAAEMTAVLEAWRRQDKHLWEWEAHSRARLRGRRDDAWRKVGAWLAEQAGVLVVDDVDLAALRQRGDVADDD
PVLPGTAAGQARARAALAAPGRLRQCATGAADRRGVAVRTVESGYLTRTCPHCGERGDAHPRYAQSAVVTCPS
CGRSYDQDRSAATLMLDRERSGDGPGKGERSQQ (SEQ ID NO: 193)
>3300006853|Ga0075420_100000070_3
[plants-rhizosphere-populus rhizosphere]
MATIVYRYGVRTRTETGRYDLPAEVWQQIHLSHRLRNALVEVEHRHDEAMRDLWSAHPQVAEVEQRLAAAEQM
VAELIDQARLEHSQDRTTATRRGTATNLREARRAVRDARAARRAAIGEAYPVVKPGIEAVRAARKAAIKDLYR
EYCQDGDLYWATYNAVVADHRIAVQAVERKRRQGQAAQLRYQRWDGTGTISVQLQRQAGQPARSPELLASGDG
QWRNVLQVRPWMPPEQFDGLTRGERKRHGRGEAVWSVGGGRTVTLPIQVHRMMPADADVCEAQLVVTRTGAHW
SAALCVTVRLPDPDPVEGRSPLALHCGWRHRPDGSVRVGTWASPEPLVPPANLADVLAAHDSGRWGEIVIPAS
WLELAGRPAALRSRRDLALEPVQRKLAEWLDQNPQPDGDDGRPGLTGGDVRRWRSANRFAALAIRWRDTPPPG
EGAAEMTAVLEAWRRQDKHLWEWEAHSRARLRGRRDDAWRKVGAWLAEQAGVLVVDDVDLAALRQRGDVADDD
PVLPGTAAGQARARAALAAPGRLRQCATGAADRRGVAVRTVESGYLTRTCPHCGERGDAHPRYAQSAVVTCPS
CGRSYDQDRSAATLMLDRERSGDGPGKGERSQQ (SEQ ID NO: 193)
>3300006854|Ga0075425_100000037_57
[plants-rhizosphere-populus rhizosphere]
MIVYKYGALKPKVIGGTFEDLLQYQRHSNAFYNALIEIERWRIAARDIVELAQSAPLSDEQKTEHRLAYNAAC
RAAGAATPIGWGQKQAVTEMVAAAMKTRRSDEFKARQRASKKGYDFLKRVMTCARPRHRRFDGEGILAATVQG
ATGLKASAVLTKPGPVQISGDGKHRTVTLRLREGLSLEVPIVYHRPLPERAEKEGVPYDVRVIFARLVIDRIG
DRWTYSVHLTIDAAPRVHVAQGGLGRCAVNFGWRRVPGGIRVAYAVDDDGNETSCVFPDALLGRQKHAESLRS
LADEIAAAYLGDAARRTKARCSALADPDAIHRELGREWFTMEQAAKRDGTDAEHWARRDRHLYQWERDEYASV
LRARREIYRLWARKLAASYDSVIIEAFDMRSVVKRTPSEDDIPAARHYRFLVGPHCLRLEIQSVFGARCEVLK
PAKRTLTCHACGALCKWDKARELRHDCESCGAAWDQDANNAKNQLLDAAE (SEQ ID NO: 185)
>3300006903|Ga0075426_10000611_28
[plants-rhizosphere-populus rhizosphere]
MKRRTSPLPTRIWSYGCLRPTTNTDAFFDQLRKAHVYYNTLIEIERDRRAEYRKDRAKLCPDIEKFEAEFLEL
DKAVDLFRATMKAEKKKKDDTGELKRLKDARKAIGEKLKALRLEMKNSPELKKLQEKEKEVVSGKVRAARKSS
GVYWGTYLLIEKAVETARRSKMDPRFAKWRGTGRIGIQLHHVKWSDIVDGKSQMFQVDPLPETQWDTRKGRRH
AYTKARVRVGTEKSATTGKQVPVFVEVPLYLHRRPPADAKLTWAWIFVTRKGPTLRYQLQLSVESNLFSAGLP
EQPKKSVCAVDVCWRKMDHGLRLGLAVDHHGNQFEMVLPKAVPELIEMGDNMKSAADRIFNGTKDFVSKWIKE
NGLPGAIEPARVSQWLSHRKLRGLTRQWLAETIGFERARELWRAWCFERVGSRKNPLTVPKKDLFAPAEEAFA
WAEKHGLTKPFEQMAFYLELWSRKDRHLEQWAADQFYRATMIRRDAFRNWSRFLVNNYETILLEDMTHTTFAK
DSVVEAEKSFDVLHRQRNEAAPGLFMQTLRSAVGAHVVPMDPADTTNDCAHCRHRNDWSQTERSKNVVLTCAG
CGKMFDQDANAARTMLIRYFEGDTGSGGSKDKPKPASPPPSKPPPRALTKRRKPGAEPRASV (SEQ ID
NO: 194)
>3300006914|Ga0075436_100000782_9
[plants-rhizosphere-populus rhizosphere]
MKRRTSPLPTRIWSYGCLRPTTNTDAFFDQLRKAHVYYNTLIEIERDRRAEYRKDRAKLCPDIEKFEAEFLEL
DKAVDLFRATMKAEKKKKDDTGELKRLKDARKAIGEKLKALRLEMKNSPELKKLQEKEKEVVSGKVRAARKSS
GVYWGTYLLIEKAVETARRSKMDPRFAKWRGTGRIGIQLHHVKWSDIVDGKSQMFQVDPLPETQWDTRKGRRH
AYTKARVRVGTEKSATTGKQVPVFVEVPLYLHRRPPADAKLTWAWIFVTRKGPTLRYQLQLSVESNLFSAGLP
EQPKKSVCAVDVCWRKMDHGLRLGLAVDHHGNQFEMVLPKAVPELIEMGDNMKSAADRIFNGTKDFVSKWIKE
NGLPGAIEPARVSQWLSHRKLRGLTRQWLAETIGFERARELWRAWCFERVGSRKNPLTVPKKDLFAPAEEAFA
WAEKHGLTKPFEQMAFYLELWSRKDRHLEQWAADQFYRATMIRRDAFRNWSRFLVNNYETILLEDMTHTTFAK
DSVVEAEKSFDVLHRQRNEAAPGLFMQTLRSAVGAHVVPMDPADTTNDCAHCRHRNDWSQTERSKNVVLTCAG
CGKMFDQDANAARTMLIRYFEGDTGSGGSKDKPKPASPPPSKPPPRALTKRRKPGAEPRASV (SEQ ID
NO: 194)
>3300007076|Ga0075435_100000061_47
[plants-rhizosphere-populus rhizosphere]
MKRRTSPLPTRIWSYGCLRPTTNTDAFFDQLRKAHVYYNTLIEIERDRRAEYRKDRAKLCPDIEKFEAEFLEL
DKAVDLFRATMKAEKKKKDDTGELKRLKDARKAIGEKLKALRLEMKNSPELKKLQEKEKEVVSGKVRAARKSS
GVYWGTYLLIEKAVETARRSKMDPRFAKWRGTGRIGIQLHHVKWSDIVDGKSQMFQVDPLPETQWDTRKGRRH
AYTKARVRVGTEKSATTGKQVPVFVEVPLYLHRRPPADAKLTWAWIFVTRKGPTLRYQLQLSVESNLFSAGLP
EQPKKSVCAVDVCWRKMDHGLRLGLAVDHHGNQFEMVLPKAVPELIEMGDNMKSAADRIFNGTKDFVSKWIKE
NGLPGAIEPARVSQWLSHRKLRGLTRQWLAETIGFERARELWRAWCFERVGSRKNPLTVPKKDLFAPAEEAFA
WAEKHGLTKPFEQMAFYLELWSRKDRHLEQWAADQFYRATMIRRDAFRNWSRFLVNNYETILLEDMTHTTFAK
DSVVEAEKSFDVLHRQRNEAAPGLFMQTLRSAVGAHVVPMDPADTTNDCAHCRHRNDWSQTERSKNVVLTCAG
CGKMFDQDANAARTMLIRYFEGDTGSGGSKDKPKPASPPPSKPPPRALTKRRKPGAEPRASV (SEQ ID
NO: 194)
>3300007076|Ga0075435_100000750_29
[plants-rhizosphere-populus rhizosphere]
MIVYKYGALKPKVIGGTFEDLLQYQRHSNAFYNALIEIERWRIAARDIVELAQSAPLSDEQKTEHRLAYNAAC
RAAGAATPIGWGQKQAVTEMVAAAMKTRRSDEFKARQRASKKGYDFLKRVMTCARPRHRRFDGEGILAATVQG
ATGLKASAVLTKPGPVQISGDGKHRTVTLRLREGLSLEVPIVYHRPLPERAEKEGVPYDVRVIFARLVIDRIG
DRWTYSVHLTIDAAPRVHVAQGGLGRCAVNFGWRRVPGGIRVAYAVDDDGNETSCVFPDALLGRQKHAESLRS
LADEIAAAYLGDAARRTKARCSALADPDAIHRELGREWFTMEQAAKRDGTDAEHWARRDRHLYQWERDEYASV
LRARREIYRLWARKLAASYDSVIIEAFDMRSVVKRTPSEDDIPAARHYRFLVGPHCLRLEIQSVFGARCEVLK
PAKRTLTCHACGALCKWDKARELRHDCESCGAAWDQDANNAKNQLLDAAE (SEQ ID NO: 185)
>3300009100|Ga0075418_10076301_2
[plants-rhizosphere-populus rhizosphere]
MTEKPPTKIYTYGLLQPTKNGHEFSKMCRAAHDYYNALLEIERTRQREEDDFWAKRGGYVDLLDEFRQLEAMR
PRRDDPKREEIFARRKELRKKLWELRDVTVDRSLPIEDANRRNRHRELKKAAKAEGRNITDAEISASLDKDPS
CVSPRRRAQLEYTEEAKARGVNVSGRGLNQYLRDRGLLKVTQPIDDRAAEDQKRARDHFELYYGTYLLVEPAA
EQAIERSEMFPAFKPWRGEVGRVGAPVNTNTGISVEAIHNCFNEDPKTGERTFSDGGNTVLQIIPIRKEVRES
RRVRVKGAPSAHQQGMKFLNQTVMRICVRSEGRVGAQRIPVWVEFPMQYHRDLPPNAKVTAAWVIASQLGTRT
VYKLQLQVQDEAFRNPVKPCGRSTMAVNLGYRSTGRVAYALTQDGRYEVMDVKDRVGKCIDEADELRSLRDRD
ANRMRNDLFEWRDVEAYPQSFLEGDGEKFVPHWSGDEKRRRSVKVRSMKTRIDGLVHARDDSLPTRLRAIYET
WERMREQGLLRSVDDRIFKVFREWYIEDKRSQDKEAHQRLNAHGTRELDIYAWAHRLCDEASLILVEDTNYAT
MKLKSNRRPKEELPVEISVSIARRRDMYAPGRMRKILEQVAVKRGVKIVRLSSVGLTQRHHKCGFDEPWDAMR
SIQHKCEGCGVTFDQDRNFCEGLFERYRGTLPAAPARKAGKGKKSRDLPAEAE (SEQ ID NO: 195)
>3300009100|Ga0075418_10076301_2
[plants-rhizosphere-populus rhizosphere]
MRSMTEKPPTKIYTYGLLQPTKNGHEFSKMCRAAHDYYNALLEIERTRQREEDDFWAKRGGYVDLLDEFRQLE
AMRPRRDDPKREEIFARRKELRKKLWELRDVTVDRSLPIEDANRRNRHRELKKAAKAEGRNITDAEISASLDK
DPSCVSPRRRAQLEYTEEAKARGVNVSGRGLNQYLRDRGLLKVTQPIDDRAAEDQKRARDHFELYYGTYLLVE
PAAEQAIERSEMFPAFKPWRGEVGRVGAPVNTNTGISVEAIHNCFNEDPKTGERTFSDGGNTVLQIIPIRKEV
RESRRVRVKGAPSAHQQGMKFLNQTVMRICVRSEGRVGAQRIPVWVEFPMQYHRDLPPNAKVTAAWVIASQLG
TRTVYKLQLQVQDEAFRNPVKPCGRSTMAVNLGYRSTGRVAYALTQDGRYEVMDVKDRVGKCIDEADELRSLR
DRDANRMRNDLFEWRDVEAYPQSFLEGDGEKFVPHWSGDEKRRRSVKVRSMKTRIDGLVHARDDSLPTRLRAI
YETWERMREQGLLRSVDDRIFKVFREWYIEDKRSQDKEAHQRLNAHGTRELDIYAWAHRLCDEASLILVEDTN
YATMKLKSNRRPKEELPVEISVSIARRRDMYAPGRMRKILEQVAVKRGVKIVRLSSVGLTQRHHKCGFDEPWD
AMRSIQHKCEGCGVTFDQDRNFCEGLFERYRGTLPAAPARKAGKGKKSRDLPAEAE (SEQ ID NO: 196)
>3300009156|Ga0111538_10081463_8
[plants-rhizosphere-populus rhizosphere]
MQRQKDDSITSRVYVYGCVPERVAPVHNEDRALEQMRLGQRLWNVLVAIDRARVARYRRIMADEAQERIDALR
DQAAALRDEIKTRRKQARKRSVDIGDLAERLAAVKSELSALIEEQKRTSTERHDARRAELTAMQERTNHRIKR
ARQAAASLGLFWGTYNDIVQRSDAGRKHGGELHFRGFRGEGTLTAQIMGGAIVTRCVEGAHTFFQVDPPQPGR
KWRYARMRIGSEERGGVKLAPVWLEIPIVYHRDLPPAGMIKSVSMTRRMLAGKPRWQLNVTLNLPAPKPTTRT
AAVAIDIGWRLLPEGVRVAYWMDDAGQHGQVLIPSRDISQFERVRSLRSNCDLSRDEILPGLAEWFGGLELPA
EWAQRVAYLSQWRSSDRLAGLYDWWRDHRLPGDAETFEAYTTWRKQYLHLAHWWRNLQDQMTLRVREQYRVFA
AQLAGRYGVVYIEDFDLSSVARKPKTEGDGEKSASSTYRQMVSPSMFRGALLNALQREGATVTELPAEYTTRI
CSTCGYGREWDQAESVMHRCGGCGEMFDQDENAAKNLLRLVAQGVAG (SEQ ID NO: 197)
>3300005548|Ga0070665_100000073_173
[plants-rhizosphere-switchgrass rhizosphere]
MTTLAFKYGLGDPLDWDTDIADQLYLQNKLWNRLVEIERDARTRYRAVVGEDDAIAPLVRDIEAAKAQKEALL
TERKGLRAKARKRVPTPEIDARIAECATVVRELAQRIKTERVAAKERLAPHVRAIEEWRFGAVKEARNASGLW
WGNYNAVCASYDTARSRAMKDGAELQFHRFTGEGRLTCQIQGGTTPEQIVDGKCSLVRVDPLSAGAHSHPSRG
ERRRLQRTKIAVTAYMKDGERRLLTLPMQMHRPLPDGAIVKQVVVTRRKIGTRYRWHAVFTCSVPDAQPVQHA
STSACGVNFGFRQVLGGLRVATVSTSPSKTPDYLVLPEEWLRAMDRCEALQSARDEHLLPMHAAARELTRGED
APESLRDKLDRIARAPKIGSALLASLVLAWRDTHADWQSDKLVGFEAWRRNDKRAAEEQANLRDKLHASRTER
YRLWARELVRDHALVGCGKIELRKLAELEKQDGTENDLHARARSNRQRVSLYSLQLELARAAQLAGARVVMAD
GPLTSTCHACGATTLIKPDIMQVCDHCSAVWDQDHNAALNALSYAQQSPPPRERSGDAQDTDQENQVFGEPAE
EKKDSARNVRLAA (SEQ ID NO: 198)
>OBLM01000011_1
[soil metagenome]
MHSRVYLYGLLPPTPACAPLVEQQMGRAHRYRNVLVEIERERRAKVREVMAAHPDMAPLEEQVNALVAERETA
LQALPRKAARNDPARANVRAMATRIRDLRGQIKAARKAVLADAEVARQLAEADEFSRERVRRARATCNVYWGT
YLLQEADADRARMERMPPKFHRWTGEGRVSVQLQGGLEQDKMWGGDTRMQIDPVAPEAHDPLSPRGVRRRAHR
TVLRLRVGSDAQRGPIWAEWPMLMHRPLPKGAIIKVATVSRRYRNCTTWDWQVLLTVSIPDESARPAPAAGVV
ALNLGFCERPDGSLRAGYLVGDDGWTQEIVVPASTSELLGKCDSIRSFRDKNLDAMRPLLSAWRQDQNLAFER
VCRDVIAACETTPPELDGAFYRLAMYIVNGGHSLPSWLHERIQSVHAWRSHDRFRKLALTWRDRRFPGDHAAY
ELLEVWRYRDQHLEHYESGMRRRTLLRRREGYRIIAAAAAARYRTLLVDDTDLRHFQRKPDPEDGATVPEQIG
LATMRVNQRLTACSGLREALASAFGSRVVKMSSQNVSRRCHACGDINLAMSSAREQTCTGCAATWDVDQNACL
NLLGEHRRDDPDRETARVAKLANAKPSRGKRLSAARASNGATVLAREASGN (SEQ ID NO: 199)
>OCTA010000646_37
[soil metagenome]
MKRRTSTAPVRIYAYGCRLPTQGGELVEQQLLFRHRYYNKLIEIELDCREKMRAARSASSEDVAHAESAFAIY
ETEIVGVLDAIKAKKGAARAAKVDAAEERAVLAVLRDMKRKTIDDLHAAKLAARTPELLAEFTAIQEAANAEV
RDARSKCGVYWGTYLLVEQEVEQAVKAARKNHEDPGFRRFMSVPNRQGQATIARGRVGVELIHGVPVATIMAG
TDTRLQIHMEKSDSKRGQTMARAKIRVGTAENGRSPIFAEFPFRMHRPLPADGVVKWAWISKSTKGRWVDWSL
QIVVEAASLHRPVRQPSDGGVVAFDIGWRVRLHEVVNELRVAYWHDDQGNHGELVLPSDDRVRVDSRGRKHRP
EGVRGRFDHVDSLRSIEDKNFDAIRSELVAWKTGRDLPEWFVSALEWLHAWKSHRKLGAVFDQWRSNRFSGDD
GMFAKVETWWKQHRHLYDWESCERDRALNARKNTFRQWAPQFTRKYAVVVLEEKFLAEVAKLQAPDSTKANMP
RPTRRNRTVAACGEFVLALKNAAPGNGCTVDAEPCEDTTATCARCGYVERFDHRPLAHACARCGDVSGPVDQD
RTAAENLLAAYAGKMSRSQSASEGGNIVGDPDGSLVIPAQEGVS (SEQ ID NO: 200)
>ODAK010001378_33
[soil metagenome]
MIRVYRYGVASPHDGADLVYAQMRGAHAYRNTLIEIERGRRGALRDLESAEVRGLTAEVAAADEACQAIGSTI
KVARAESRKRSERKVDLERLAEARSVKRAITGRLYEARRNHMLATRSAVDIVNELAKCLLKSAREHCGVYWGT
YLLAEEAMGASSSAPLFGKDGITQNDPKFIRWTGDGAVRVQIQKGASVAAVRADAEHSQLQIREPTGAWSHPT
RSERRRLAKRGEVRIRVGSEPNGKPVWAAWRLDMHRPLPEEARIKEATIHVRQRGAHSEWSLLVTVDVPPAAV
VPSESRGEAVGVDVGWRLIDGCIRVAVCMGAGGAVTELRLDAPTIRLLRSSEALRSKRDERFNAAKARIRKAA
AEPVAPEWLRESGKTMHAWRSPQRLAQLHARWAEERFSGDDMVFGRLEAWWWTDRHLWSTEAQASLQGHRRRK
DIYRVFAAKLAARYDVIVLEKFDLRKVARTEETGEETPAGDNDTSRSNRQLASVSEFRACLLDAARSRGRSVV
MVDASETTRTCHVCGLVEAFDAAAHLRRTCACGSEWDQDENAAEVILARWRERPGDAKILVPARSTEIYCETM
ELLETRWQRVARLRKEKLARMDTARKSASNAAE (SEQ ID NO: 201)
>ODAK010029943_5
[soil metagenome]
MMVFKYGTVPARIAPVIGAEQAATQLRLANRLWNLLVAIERARVARYRKVMFDAAQGRIELLKAKLSALRGKI
QVRRQAGRRRVDVSDLTAESQEIRAAIKAEIKAHKATSAERHDARRAELDALSETSKSRIKRARQAAASMGLF
WGTYNDIVQRADVGRRAGELHFRRDTGDGTLTAQIMGGADPEECMTAHSFFQIASKCPLSGLVAGDVAETDAQ
PVKWQYARMRIGSTGERQPIWLAIPIVLHRPLPDGARIKSVSMTKRKTTWSLNVTVAEPAPTPKLIGPRVAID
LGWRVVPSGVRVAYWADTLGGEGQVVVSDEDIGQFGRVRSLRSRCDTMRDEYLPVLAAWTSGRELPAEWQAET
IALVQWRSPDRLARLIRWWARLPGDAEMFSRASAWRKQYLHLANWWRNLEDQMRGRLREQYRIFAAGVAKKYS
TVYLEVFHLPDVIETPAAESEEVRTAESRYRQMVSLSVLRAAVRNACTREGCTVVDVAPEYTTLGCHLCGTIT
EWDTAASLMHQCKGCGAVWDQDQNAAINLLARGASGGAPPTANQPDRPRKWDRVRDRSRKSAQAAESAILAAA
AVEMPAQRLSC (SEQ ID NO: 202)
>ODAK010029943_6
[soil metagenome]
MTKPLSGLVAETGLLFRAFRAARPSSKCLLSGLVVETECDNVVMMVFKYGTVPARIAPVIGAEQAATQLRLAN
RLWNLLVAIERARVARYRKVMFDAAQGRIELLKAKLSALRGKIQVRRQAGRRRVDVSDLTAESQEIRAAIKAE
IKAHKATSAERHDARRAELDALSETSKSRIKRARQAAASMGLFWGTYNDIVQRADVGRRAGELHFRRDTGDGT
LTAQIMGGADPEECMTAHSFFQIASKCPLSGLVAGDVAETDAQPVKWQYARMRIGSTGERQPIWLAIPIVLHR
PLPDGARIKSVSMTKRKTTWSLNVTVAEPAPTPKLIGPRVAIDLGWRVVPSGVRVAYWADTLGGEGQVVVSDE
DIGQFGRVRSLRSRCDTMRDEYLPVLAAWTSGRELPAEWQAETIALVQWRSPDRLARLIRWWARLPGDAEMFS
RASAWRKQYLHLANWWRNLEDQMRGRLREQYRIFAAGVAKKYSTVYLEVFHLPDVIETPAAESEEVRTAESRY
RQMVSLSVLRAAVRNACTREGCTVVDVAPEYTTLGCHLCGTITEWDTAASLMHQCKGCGAVWDQDQNAAINLL
ARGASGGAPPTANQPDRPRKWDRVRDRSRKSAQAAESAILAAAAVEMPAQRLSC (SEQ ID NO: 203)
>3300005602|Ga0070762_10000001_34
[terrestrial-soil]
MKLVYKYALASPHENFDLIDLQMRAAHRYRNTLVEIERGRRAAVRLVEAEAGDMPAAQRALTMAIGARELADG
AIKRHRARSRKRDEPQEMRDTLRAARVAERDAAKAFRELRLKIKDSPAMIAARDAIGERAKELQRSARANCGV
YWGSYLLVEGAVSDSFSDTSLYNKDGHANDPAWARWTGEGSVGVQIQTATADKATKSLTVERAASGNDSRLRI
VLPDERAWDRSGRTHRECENMARQAQLSIRIGSNGRDPVWGSWRMDMHRPLPVGSTIQLATVHRKRVGPYDRW
HVTFTLDVPASTRASTAGTGTIAVDVGWRVMGDELRVAGWQDDTGDRGELRLSAKDLAVLRAPEAMRSARDLR
FDAARLALSVWLRDHREILPDWLRVISANVHAWKAEARMVALRNRWMDARFADDEAAYDALTNWAFRARHDWA
VESCARGQALRRRREKYRVWAAQLATKYDTIVIENFDKRRVAATSRDATTENETARANRVLASTSELVSCMET
AARSRRAALFAVPCADTTRTCPTCGLVESRDAAAAVRLECECGARWDQDVDGAPLVLLARWRERPGDAKIVVS
AREQEKTNENGEKKEGRWAKVARLRAEKVARMATAREADADGAE (SEQ ID NO: 204)
>3300005602|Ga0070762_10000001_32
[terrestrial-soil]
MWSIGASVATRCCRRRPSDRYGSDKRNKEIVTMKLVYKYALASPHENFDLIDLQMRAAHRYRNTLVEIERGRR
AAVRLVEAEAGDMPAAQRALTMAIGARELADGAIKRHRARSRKRDEPQEMRDTLRAARVAERDAAKAFRELRL
KIKDSPAMIAARDAIGERAKELQRSARANCGVYWGSYLLVEGAVSDSFSDTSLYNKDGHANDPAWARWTGEGS
VGVQIQTATADKATKSLTVERAASGNDSRLRIVLPDERAWDRSGRTHRECENMARQAQLSIRIGSNGRDPVWG
SWRMDMHRPLPVGSTIQLATVHRKRVGPYDRWHVTFTLDVPASTRASTAGTGTIAVDVGWRVMGDELRVAGWQ
DDTGDRGELRLSAKDLAVLRAPEAMRSARDLRFDAARLALSVWLRDHREILPDWLRVISANVHAWKAEARMVA
LRNRWMDARFADDEAAYDALTNWAFRARHDWAVESCARGQALRRRREKYRVWAAQLATKYDTIVIENFDKRRV
AATSRDATTENETARANRVLASTSELVSCMETAARSRRAALFAVPCADTTRTCPTCGLVESRDAAAAVRLECE
CGARWDQDVDGAPLVLLARWRERPGDAKIVVSAREQEKTNENGEKKEGRWAKVARLRAEKVARMATAREADAD
GAE (SEQ ID NO: 205)
>3300006796|Ga0066665_10000988_15
[terrestrial-soil]
MSEQLDDTPEQPNEVEETKKRKQRNKGKHPARIWSVFSRYLVSGREHFDKQVLLAHRFRNKLVELELQRRAAA
NVVIAQASSELQPLIDALAAAEQVLEVSLQELKAVRAKHRRRAESAAQRDAVTNARTARNQASKALSKARKDA
FASEAAQVGLWLAEEHHFQAVLAARHAFINDGLYWPTATDVQDRARAMRKGAPPVFRRFGGAEQAGRIAVQIQ
QRTDKSQSEGGITFEEAFSCSHGFFRLEKKPGRDPLPEIADQPDYKSKRQQLLTYARAWLRVGSEGKGARAKP
CWVVADVLLTRQAPKTARIVQVYLDHSVIGDRERWRLSLVLTNQEGWPKPNRASGCMVGIDLGWRLLDTGELR
VAYACGADGQHHELRLPASLVKVWRRPDRIQQERDNLFNDVKARLLEWLKGREDLPDWLKEQAEHLHLWKSST
RLSRLVDHWAGRDINWSSQRRIAGDEEILASLRGWVKRNLHLRDYQYHEREQLAAHRLDVYRKWADGLARLYQ
TAVLEDADWRDLARLPSPEDDAVNETARYNQRMASPGLLASVITNMFAITSRVECANTTRECWRCGHTEAFDA
EAQLIRVCPGCGDACDQDESAARVLLARGQALNQSQVAEAAPSS (SEQ ID NO: 206)
>3300018429|Ga0190272_10000030_113
[terrestrial-soil]
MAVVVHVYGVPPVLHGERVRLPAEVDEQLSLAHCLREDLVTLEHQRQDAVTAVWSSYPQIAAIETQLTAAETE
LTDRSAAAAAERSAARKKGPTESSEAVRQLKARIKDLRSQRRTAIADAHPTATPRLTAIADAHRAAIKALYAD
YSQGRGLYWATYNDVVAHHQVATKRVAAERKAGRPANIRHHRYDGSGSITVQLQRQTGAPPRLPATIADEQNG
PWRNVLYLTPWVDPDTWATLARAEQRRRRLGVVRLDLGNKRHLSIPVLVHRMLPADADITSARLVVRRVAGHR
KIELHVTARIKDPVTRSGGPAVALHLGWRREDGGAVRVATWRSTAPVHVPDDLNDLVHADTDHTGTISLPARW
WHRVSTQPEMAARRATSLNDIRDQLVAALTDNPLTITADDEDAQPVPTAAAVATWRSPARFAHLARTWATDCP
AGHQATAAALENWRRSDRRLWEQQAHGTANTLAARADAYRRTMSWLLTGASRLVLDNTAIADLARRADPATEP
TLPTAVTDRVAHQRIGASPGQLRSIATTTANSYGVAVAVMPHTGITRTHYRCGHLNPADDRYSAARIVTCDGC
GQHYDQESSATLMLLAASGDVAAPGSATARNPDTSAHA (SEQ ID NO: 207)
>3300018432|Ga0190275_10000082_154
[terrestrial-soil]
MTTLEARVAQYGCLAPIENADVVRQQMRLGARYYNELIALERCRRAVYRDLRRKYVDLESVEARVEELAAELM
SLREAIKGVRKEARRRVDTADLDQRAKDVQSALRVARVALKDARQAARDNAELRAAVEQLDERAKIWSKALRA
MRAPWWGTYLLEEASAEQARKATIDPSFRRARGRERISAAGEGSAEGRIGVQVQGGMTVAELYGCEDTRLRIE
PVSPDAWHASSRGVRRRCSRTRLWMRVESAGRSPVWAVFPLILHRPIPDDARIKGAVVRLRVLGFREQWTVSV
TYAREPAVMPERPGIVALDLGWRQRPDGSLRVAYCADDQGNHREVVMPESVRMRLRKARDLREIQDLHFNRAV
RWLARWLDAGKAPEWLARERPHLGQWRSHGRLRRLVLDWRRTRFVGDERIFAAMERWLHRSRHLYQWEVDAQR
KALLARRELYRCTAAQIARAYGRVVIEQFDLATAKRLKAPEQGEDAPLAQRAQLHASAPGEFRQCLTQAVQRE
GGLVISVDASGTTSHCHACGGVCSWEQGEELWHRCEYCGELWDQDHNAAINLLRRFTRDHSGDATNPAPARKP
SKRAERFRKRHAQPAATDVAE (SEQ ID NO: 208)
>3300018481|Ga0190271_10027355_3
[terrestrial-soil]
MELNAKPDDLELDDDIPAGEEEEEKPDLDARVAQYGCLWPIQGEDLIRQQMRAGHQYMNNLIFIERCRRTCYR
DLRREHANITEIEDLCQTLAHELDELRDQIKGARKAARSRVETKELNAKAAEVLKRLQPARKELKAARTAAAQ
NEVLKAAVKELDARVLLCQKFLRKQTDCFWGSYILVEASMKQVKKSKIDPYFRRWKGEGRIGVQIQHGMTVQR
ALDGVDRRLRIMPAPTSFLGENKSASHARHKARHLLYIRVDSEGRYPVWAVFPMIMHRDMPPDALIKGVTVHC
RKRGLRDKWSCDITFTKPAVKPAKKPGVVAIDLGWRKRPDASLRVAYWVGSDGQDGEIRMPERVSRRLRHSDG
LREVQDLSFNRMKSRLKLWLNAVDARDETLDKPMVPDFLTAIQPHMDKLRSHERIRKLVKQWEHERFEGDEHI
FWAVKQWFRSSIHLYPWEVSQRKSTLRYRREMYRLAALELSKRYGTLVLENFDLSKAKRKNAPEQGPDAPKAQ
RTQLHASAPGEFRQALVQVFLREGGEVFRVDAMGTTSSCHACGATCKWDQAEEISHRCEHCGTLWDQDYNAAK
NLLLRYALPQAS (SEQ ID NO: 209)
>3300019874|Ga0193744_1000265_21
[terrestrial-soil]
MIVYKYGALKPKVIGGSFDDLLAYQRDSNVFYNALIEVERWRIAARDIVEMDQAGPLSDEQKTEQRLAYNAAC
RAAGQASTIGWGQKQAVTEMVAAAMKTRRADEFKARQRATKKGYDFVKRVMTCARPRHRRFDGEGLLAATVQG
CSGLKSSAVLSKSGPVQISGSGKHRTVTLRLREGLSLEIPIAYHRPLPERAEKEGVPYDVRVIFARLMIDRIG
DRWIYSVHLTIDAAPRAHAAQGGLGRCAVNFGWRRVEGGIRVAYAVDDEGNETSCVIPDSLIGRQKHAESLRS
LADEIADAYLGAAARRTKSRRQALASPDATHPGLGKIRFTLGQAANHAPEDAEHWARRDRHLYQWERDEYASV
LRSRREIYRLWARKLAASYDSVIIEAFDMRSVVTRAPNKDNIPAARHYRFLVGPHYLRAEVQSVFGKRCEISK
PAKRTLTCHACGALCKWDKARELRHDCESCGAAWDQDANNAKNQLLDAAE (SEQ ID NO: 210)
>3300020021|Ga0193726_1013919_1
[terrestrial-soil]
MIKNYEYGLLDPTANAQLVDDQMRAAHRYYNQLVEIERERRAEIAAILVGHPDTEALAARVADLARQREEARL
AIKATRQATRDRSETSQMRDRVKDLATELRAARATLKTARDVIKTDAVIVAAISACDDRATTRVKARRAACEA
YWGSYKLSEEAVDAAKKAKAPPHFKRWTGDGRVSVQLQGGISDGELFGTDTQVQVAPVSPDAHDLRKPRGVRR
LASRTILRLRVQSTEKGRPIWAEWPMILHRPIPEGARVKIATVSRRRRDCRRWDWRVLLTLEIPDGASEHRRL
IPASGAIALNLGWCKRPEDAVRAGYVLSDDGVIDREVIVPPSTINRVEKSEAIRSQRDKDLDAMRVTLVAWLR
AHEAGLPAWVVERTILSREPRAVPQVDTPRAEAVRDASQRTRAWHVAQWRSAARFRALAFAWRSQRFDGDGEG
YQVLEDWRYRDEHLERYESGMRRGGLLDRRERYRMLAADLAARYRTLVVDDFDLRTFAEIPKPEDESANVKPH
RKQQRYAAGSELRAALLNAFGPTRVLRESSVDVTRACAAIVVDEATGAEHTCGQLDLWDHTVAREHTCSGCGA
TWDQDQNACKNLIGRWRERLGADGSVETARVATPRKESRSERLRRTRWKREPEAEAASTTEPHPSPSRVAPVA
PATAAPTCQKSPIVTDGAATITATAPPPSPLRAPSPVVPGQSAVRANRPIAAPG (SEQ ID NO: 211)
>3300020021|Ga0193726_1013919_1
[terrestrial-soil]
MEISRASGSHRVMPMCTQPVHACQCLQERATWDHVIKNYEYGLLDPTANAQLVDDQMRAAHRYYNQLVEIERE
RRAEIAAILVGHPDTEALAARVADLARQREEARLAIKATRQATRDRSETSQMRDRVKDLATELRAARATLKTA
RDVIKTDAVIVAAISACDDRATTRVKARRAACEAYWGSYKLSEEAVDAAKKAKAPPHFKRWTGDGRVSVQLQG
GISDGELFGTDTQVQVAPVSPDAHDLRKPRGVRRLASRTILRLRVQSTEKGRPIWAEWPMILHRPIPEGARVK
IATVSRRRRDCRRWDWRVLLTLEIPDGASEHRRLIPASGAIALNLGWCKRPEDAVRAGYVLSDDGVIDREVIV
PPSTINRVEKSEAIRSQRDKDLDAMRVTLVAWLRAHEAGLPAWVVERTILSREPRAVPQVDTPRAEAVRDASQ
RTRAWHVAQWRSAARFRALAFAWRSQRFDGDGEGYQVLEDWRYRDEHLERYESGMRRGGLLDRRERYRMLAAD
LAARYRTLVVDDFDLRTFAEIPKPEDESANVKPHRKQQRYAAGSELRAALLNAFGPTRVLRESSVDVTRACAA
IVVDEATGAEHTCGQLDLWDHTVAREHTCSGCGATWDQDQNACKNLIGRWRERLGADGSVETARVATPRKESR
SERLRRTRWKREPEAEAASTTEPHPSPSRVAPVAPATAAPTCQKSPIVTDGAATITATAPPPSPLRAPSPVVP
GQSAVRANRPIAAPG (SEQ ID NO: 212)
>3300020034|Ga0193753_10002988_10
[terrestrial-soil]
MKEIRVYKHWAEPASAVDHHRLQSQLKLAYQYRRMLAMIENAARVAQRALVQADPAIAMLINQLAVLHEADPP
ATIVITAAQEALRLARRDLHKTDAYKLEARAIGDRRQVLVRGARGLFSAQGLAWGTYQHVEEAHDQSCSENPY
WEDVKVRLTPGFGAIAVHIQNRVLPSGTLVGGRDTFVQIDAERYGLSTFRNGWRAIDPDGPSGRVQIPAGERR
PCGGGAPRLQRIRIRTGSDGRAPIWTEFHMLLHRPLPPGKILWVRAHQTRVGIRTMYNIQFVVDIDTAGRAPR
ARPAGGAVMDDRAPQARSHHVGDATDDRAPQARSMMSHAIVGVDIGWRKLENGDWRVAMAVIPDGTTDELVVP
HDVLRRADKSADLRSIRDQSRDAMRTRLLAFRETVVASLEDATPAPSADWLEATRTMHAWLKFGRFVRLRHWW
AQHRFAGDEEIYSALCAWLDNDRHLIDWQEFNIRRMKRQIDGLYQAWAMRLARSFDVIAIEDMNLTDLKASSP
GLVSDLAHERGMVVGLSHLIGWLKRATAGYNTRLVEVDPAYTTRNCRKCGFCRPASAELVIKCEACGFAEDQD
ITAGHNITARAVATLEEPTPEATPVKRRVRRTRRRPNEATTEPNNG (SEQ ID NO: 213)
>3300020034|Ga0193753_10002988_9
[terrestrial-soil]
MIDRSEIDPGNRDAQLYQRGTTQLIDRLEIDPGANQGAIMKEIRVYKHWAEPASAVDHHRLQSQLKLAYQYRR
MLAMIENAARVAQRALVQADPAIAMLINQLAVLHEADPPATIVITAAQEALRLARRDLHKTDAYKLEARAIGD
RRQVLVRGARGLFSAQGLAWGTYQHVEEAHDQSCSENPYWEDVKVRLTPGFGAIAVHIQNRVLPSGTLVGGRD
TFVQIDAERYGLSTFRNGWRAIDPDGPSGRVQIPAGERRPCGGGAPRLQRIRIRTGSDGRAPIWTEFHMLLHR
PLPPGKILWVRAHQTRVGIRTMYNIQFVVDIDTAGRAPRARPAGGAVMDDRAPQARSHHVGDATDDRAPQARS
MMSHAIVGVDIGWRKLENGDWRVAMAVIPDGTTDELVVPHDVLRRADKSADLRSIRDQSRDAMRTRLLAFRET
VVASLEDATPAPSADWLEATRTMHAWLKFGRFVRLRHWWAQHRFAGDEEIYSALCAWLDNDRHLIDWQEFNIR
RMKRQIDGLYQAWAMRLARSFDVIAIEDMNLTDLKASSPGLVSDLAHERGMVVGLSHLIGWLKRATAGYNTRL
VEVDPAYTTRNCRKCGFCRPASAELVIKCEACGFAEDQDITAGHNITARAVATLEEPTPEATPVKRRVRRTRR
RPNEATTEPNNG (SEQ ID NO: 214)
>3300020156|Ga0196970_1000866_40
[terrestrial-soil]
MAYGHTALPAINWVYGCKRPFEGEELIRSQLRQANRYRNVLVAIERRRRTNFEQLVLRLCPELQKLETQRNNL
TQEIIELRAAMKAENARQRKTVRNPESTRRIKELQAQRQLLRPRIKELRDATYTHPTVKVVDENAAAWVKRAR
AACGIYWGTYLVREATVKQAIKDARPGLPEFKRFTGQGAVAFQSQQGTSTALLEAGGGNNLVQMHWNEPRNRR
GRRRGELWFRIGSDANRRPIWAKASISQHRPFPPDTVIKFGHLHLTKCGTRESWSVRFQLVRESGFVRTGLAA
AGRVGVDIGWRRVPGGLRVAYWVGDDGREGQELLPEDFLASKQYVEELRSRRSLEFDAVRQRLATWLQMTSNV
PEWLLDRTHSLAQWKSVDRLCWLVKAWAEQRFSVDESIFPVLWRWRGQSLRLKEEESHGQRKLVVRRRQLYRE
IALRLAQEYRTICVEDFNLQKLLTKPQVEQDAVEAGVTYHSQLAAVGELRMFLAERAADVLRLPAQGTTQHCH
MCGAKSNASDKSQLVHTCQSCSAQYDQDRNAALWLLRGGVPEYAIDGA (SEQ ID NO: 215)
>3300020579|Ga0210407_10000200_14
[terrestrial-soil]
MTMIRVYKYGLLRPIQNEALVRAQLRAKHDYRNTLIEIERGRRTAMRNVEEQHSELATAMAASRAALVELEES
RQAIRLARSKSRSRSETNVMKERVKQARIVRRTTSQALYDCRARVRPEMISARDVINERAAELVRGARALTTS
YWGSYLLAEDEVKAAAKQPLYDDSTPNDPRFERWTGEGQIGMQIQNGMTPGEVLSSEDTRLRISEPNWNDGKH
VRTLRTLSLRVGSEGRKPVWASWPLIMHRPLPPAARIKRCNVSLRRHSSREIWSAELTIECPNVTSAIREEHG
WGRGGGVEGAVGVDIGWRVVTDDDAGLRVCAYASEDGQDIGELRLSPHEITRLRKADEIRSIRDKRFDAIRLI
VRDKLATLEVPAWLSMSTLHMHVWRSPARLVSLSKRWSKERFANDEEVFDLLESWRYWDSQHYQWECDQRTKA
LRRRREKYRVFGARLAEKYEVLVLEDRAEDDRTKPMDLRKFARRAQTEMEPENETARSNRHLAATSELRQALE
EAFISHGGRVELAPCEDTTRTCTACGVVDRGLDAETEIDVTCSSCGAKQDQDVRASNNLCERWRKAQNAGGAR
NAKAAKSEGRWKKARRLRTEKQQRMGTFRNASDNSAE (SEQ ID NO: 216)
>3300020580|Ga0210403_10000550_35
[terrestrial-soil]
MTMIRVYKYGLLRPIQNEALVRAQLRAKHDYRNTLIEIERGRRTAMRNVEEQHSELATAMAASRAALVELEES
RQAIRLARSKSRSRSETNVMKERVKQARIVRRTTSQALYDCRARVRPEMISARDVINERAAELVRGARALTTS
YWGSYLLAEDEVKAAAKQPLYDDSTPNDPRFERWTGEGQIGMQIQNGMTPGEVLSSEDTRLRISEPNWNDGKH
VRTLRTLSLRVGSEGRKPVWASWPLIMHRPLPPAARIKRCNVSLRRHSSREIWSAELTIECPNVTSAIREEHG
WGRGGGVEGAVGVDIGWRVVTDDDAGLRVCAYASEDGQDIGELRLSPHEITRLRKADEIRSIRDKRFDAIRLI
VRDKLATLEVPAWLSMSTLHMHVWRSPARLVSLSKRWSKERFANDEEVFDLLESWRYWDSQHYQWECDQRTKA
LRRRREKYRVFGARLAEKYEVLVLEDRAEDDRTKPMDLRKFARRAQTEMEPENETARSNRHLAATSELRQALE
EAFISHGGRVELAPCEDTTRTCTACGVVDRGLDAETEIDVTCSSCGAKQDQDVRASNNLCERWRKAQNAGGAR
NAKAAKSEGRWKKARRLRTEKQQRMGTFRNASDNSAE (SEQ ID NO: 216)
>3300020580|Ga0210403_10001296_17
[terrestrial-soil]
MIRVYKYGLLPPTQNINLVRDQFRAAHEYRNLHVEIERGRRAAVRELFDTDEIRAASELLSRTNGAERLPIYK
SLAALRSKRLKESSTRVDEIEELAAGLRRGARALTRCYWGSYLTIEAASDQVRKMPLYGRDGITPNDPRFIYW
SGESQIGVQLQGGLTIPVLHEARDTRLRLERVSLEPARGRHPASRCRMLWIRIGSEGRAPIWATFPLRYHREL
PSNATIKWARVSLRREGLREEWSCEITIDIPGAHPRTLDTSLTGAIAVSLEWTAAVNELLVARTLDCQTGEYD
ELRLPARMVTGLRKPDGIRSVRDKNLNELRPRLIAAFREPMAPWLAAMVARIPHWRSPDPFHALAMRWRREKC
DDAREAYDILQTWELRDAHLWDYEAGSRREALRERRELYRVWSAKLSRRYKTVVLSDADLSVEARTTKEVQTD
RQTAAVYELRQSLRNAFAGEESMGPGSNVQELCDRWNGEQTTGNIRNGEKSNTFEEVKGGAWAKRKSKKSSAK
SILDATR (SEQ ID NO: 217)
>3300020581|Ga0210399_10010852_9
[terrestrial-soil]
MSVLVYKYGLRPPIEQADRVMLEMRAAHRYRNTLVEIERGRRAAQRALLAEQPQLAPFELALTVAQAELTQAY
LEIRAARQTTRRRSETEPMRVRLRETRAAVRDARGSLYLARAWLRADPALATARDRIDGVAEGLRKNARAYRG
CEWGTGGLIEKADEQARQMPLYDGAEPNDPRFQRWTGEGRISVQLQGGLELAGLEADTQLRIGDGVRLPGQTK
PSKHAERYRTLWMRVGSDERRKPIWAVFPLKLDRPLPTNAIVKLAVVSRRLDGPRVSWTVELTLDTTTCARRE
SCGHGIVGIDLGWRVFGDEIRVCAWDGDDGETSELRLHGRLLSGLSRADDLRAVRDKNFNAALAAYLAWTDRQ
GPLPAWMRPRGIHQWRAPGRLAGLCLRWSRSRFAGDAVGFDALDVWRRRDLHLWWYESGQRRGSLAARKDLYR
RFAAWLARRHDTLVLEDFDLTRVSFKGQANAQANANRHRVATSELRLILIHAFKSRGGRVVMMNPYMSTHECP
VCHAVTAFDAAAYVTYSCLGCGASWDQDESAAKILRERGSDVGDPQSARSENGPDSGGLAESRWAKAKRMKRE
KEAARNETGKGA (SEQ ID NO: 218)
>3300020583|Ga0210401_10033176_5
[terrestrial-soil]
MIRVYKYGLLPPTQNINLVRDQFRAAHEYRNLHVEIERGRRAAVRELFDTDEIRAASELLSRTNGAERLPIYK
SLAALRSKRLKESSTRVDEIEELAAGLRRGARALTRCYWGSYLTIEAASDQVRKMPLYGRDGITPNDPRFIYW
SGESQIGVQLQGGLTIPVLHEARDTRLRLERVSLEPARGRHPASRCRMLWIRIGSEGRAPIWATFPLRYHREL
PSNATIKWARVSLRREGLREEWSCEITIDIPGAHPRTLDTSLTGAIAVSLEWTAAVNELLVARTLDCQTGEYD
ELRLPARMVTGLRKPDGIRSVRDKNLNELRPRLIAAFREPMAPWLAAMVARIPHWRSPDPFHALAMRWRREKC
DDAREAYDILQTWELRDAHLWDYEAGSRREALRERRELYRVWSAKLSRRYKTVVLSDADLSVEARTTKEVQTD
RQTAAVYELRQSLRNAFAGEESMGPGSNVQELCDRWNGEQTTGNIRNGEKSNTFEEVKGGAWAKRKSKKSSAK
SILDATR (SEQ ID NO: 217)
>3300005435|Ga0070714_100002341_12
[terrestrial-soil-agricultural soil]
MSLKVYRFGARMPLDRDLVVAQLRAAHDYRNELIQYERGRREAMRALYDTPEIRDAEALLKQATKSDRKAAKR
ALYTLRREVLEARRDEAQAINALHHELQLGARALTRCYWGSYLDVESAMQQARAAPLYDEDGLTPSNPRFLRW
REPMQGQIGMQLQASRPLTTADAMRGADTRVRVERRDGPYATLWIRVGSEGRAPVWARVPIKMHREIPNAATW
KWVRVSCEPRSLRDNPEYRETWSVEITVDDPAPRARDLDTSRDGAIALSWSWDVLANESIRVASYVDTFGRRG
DIVCPASIAKGIRKPDGIRAVRDMVWNEEQKEIIHRIKRNANAPRWLVEAANTMHLWRSIARVHELARRCRIE
GIAEGPAYEALHKFVERDLHLYDYEKNARDEALRERREWYRLHACWIARTYRHALVSDHDLSREARWGDESDV
RFTAAPDQLRGAIKNALGDDAIVAYWDHEPEWCERACAAYLVGGARGEMFAERKEKTSNAWAARKKKKTETMT
ARKEAANASE (SEQ ID NO: 219)
>3300009095|Ga0079224_100000262_28
[terrestrial-soil-agricultural soil]
MKRKKSQDESINWKYGCKSPRGEGAEILRQQMREAHNYRNKLVELELLKRQEFYDLERELFPEYADLQEQEKQ
QADKVEDLRKQWKKANARARTRTEQHLLKAQIAEEKQTLKDLRARMKEMKEQVRNSEELKERSKQIKKRHYQR
LKDLRAETPAFWGNVGFVDQAAQSMASGSPPKYYRWEGEGFIGVSFRTPITPEVLMSGRNTRAWLEPCKTANN
KAGRVKKTTLHIAVESENRKLKMASLPIYFHRDFPDGCEITSVRVFCKKVGQREEWSAVFQLRSASFAKPDAA
ADGMAAIHFGWRRVDDGLRVASVVDEDGTEEVLILPESIIDSYAYVKDIQAIRDYLWNETIAILSAFLKQHSD
SLPEPVKEASQNMHLWKGRGRLVHLINVWSDHRFPGDEEMFLKLTRKGTPANEYHDSGWLHRDKHLWDIEANV
RDNAALRRKALYREFAAKMRRKYRHLITAKLDLKKIVSVKNPEEEDDAAMKHHSRVAAIHSLQAALSDSMRDG
WIVVPAAKQASTCHECGAKFQDDSGDAYISCENCGSTFDREFNACKNLLFGPKQVNAAPALV (SEQ ID
NO: 220)
>3300009095|Ga0079224_100170797_3
[terrestrial-soil-agricultural soil]
MAKRQREGTEALVYAYGLLDDQPELYSDPNVAAEVQRQRDFWDLLVRLEQEHEERVYQYLDEHAPEYRAAFEA
LCEKRRELDRLIERKRRERAEAKQKVEDPELDSAIKNATRDWKLAQKEMWAALKKARREHKEALAALRAEFYA
RIPKCKDSPLFWANYNRVRQSFDATLKRVRKQGQTVRFSDPHRDDVCLTVQIQKVRGVVGCSFEDLLSGRVSQ
LKIAPIDEAAWYTTRANRRRLCRTEVTMQVDRAGNTVRALVAVDRPVPPEARIKSAQLVWRRVGERYVGKLCL
TISMPAVERTNGSTAACGIDVGWRRTDDGGLRVATIVDSSGNVDHLELPADWMSGMDQVKRLSQYLDDAALDI
ATLLLGRDDLHPAIAAAIKRWRPGLGAGHVNVAALRDAVRELGFTGLPAELCCGVRSWRDRKERCCWYHRHIH
LSTWRDNLRRKLLLRRREIYRLAALTLAERYAVIGIEKLDLAKMAMTKKREDGSDPTLHSAARAQRQRACLHE
FRTELEHQARKRGARLELVDASKTTITCHECGAETQPTRRDRMMIHMACDSCGAVWDQDVNAARNILLAAIGA
SGDMTPPDDDGGSGAYKRHSEEISDRSQLGAPLL (SEQ ID NO: 221)
>3300010343|Ga0074044_10013672_1
[terrestrial-soil-bog forest soil]
MNILVYRYGLRAPHENRDLALSELRSSHEYRNKLIEIECARRKRVRAAEDALLGKPRLKLAEAQSALDAAIKA
VSKHRAETRKRTTPAEMLATLKAAREAQHAASKAFRSARQLVQPRCSDCRKKDLPTPCEHATPEGVGLLAELD
AAQDEAKESIKKFRNESGPFWGSYLLVDKAAGQSFSELALYDIDGKPNDPSFLRWTGEGTLGVQLQGGLSVEA
ALAGQDTQLRISSPPVACWDPSTGSRKARSRQSRESEVWLRQGSVGRAPIWCKFGLHMQRPLPPGAQIMWAEA
HCRRVGPHFDWYLTLTLKVDDAVALKPRIIPTRDAVAIDVGWRVFGEGETHELRVAYWSDGSNDAPVVIREKD
IRVPGFVIPPRGELRLDTATLNQLTQPEGVRSERDVLFDGVRARLIEWLKTPHENEPEWVDSDGVVVTLREHC
KALHAWRSQAKMAALTSRWGEWLKEHPDGDKWAYDMLVAWRGQDRYLWAVESRWRDRARLRRRELYRLFGVAL
ARTYGTVVLEEFDKREIAKRPKTEDDGEAHPARSNRQLAAVSELCECVAEAGTSRGRNVVEVPCENSTRECPV
CGCVDERNAARKVTISCACGHVWDQDDGAADTLLGRWRKRPGDAKMAGAPRKPKILNGDGSVENRMQRAKRKG
AEKALRKMELSKTTT (SEQ ID NO: 222)
>3300010343|Ga0074044_10041345_4
[terrestrial-soil-bog forest soil]
MTTRVYQFGLRPPIEGIDLVRAQLRAAHHYRNELIAIERGRRSALRQMDDTEEVRKAAGAIGGTAKADRRKAI
ANLRDARRRARESKPEEFKRIAEREHEMLLSARANTSCFWGSYLDIESAHRQARSAPLYGDDALEPSDPRFIR
WTGVEPPSGTYPRLPQSGEGQIGMQIQKKGKSSENGKSSENGKPSEEKRRLVTSDVFACLDTRVRLKRGGAKD
GDPRYGFLSLRVGSEGRAPLWATWPIKISREIPDAAEWKWVRVSLRHEGRRERWSCEITVNDPAPAARSLDSR
LRGVIAVEWEWSKLEDDSIRVARWADSMGETGMVELPGSIAKGIRKPDGIRAVRDMISHELRPRLARLIREAK
GPKPPWLVAAANTLHLWKSPRRAYELAERWTDPTLLPTARVVLFEWRARDEHLWDYEAGARSEALRERREFYR
LLAARWARRYQSIILSDQDLSREARWGEESDLRFTASCCELRGALRNAFGPDAFDGKYARSEQEDWQWCEQAR
DAWMAGGARKDAMCAKRKEQTGNAWAKRKAAAAAKRAEKGSACEPPGKSV (SEQ ID NO: 223)
>3300005468|Ga0070707_100000083_12
[terrestrial-soil-corn, switchgrass and miscanthus rhizosphere]
MPVIVYEYGLSPPKVNAAIVEEQFRLAHKYRNMLTEIELERRTKIRAIMASHPDMVPFETELAEVQAEIEKLR
GEINAIRMAARKRSSTPEQSKRIKTLAARARELRTEIKERRKRVATELAPDLKAIQDAAVQRRKDERAKSGVY
WGTYLLQEAAADQARDQPMPPKFTRWNGDGRVSVQIQQGLAKEGLWGESRQVQIATRIDSLVYDHEVTRRGDR
RRLYRTTLRMRVGSTDRQPVWAEWGISMHRPIPDGAVIKVVTVSRRRCNSTQWWWRVQFTLDTTDCKPRQRPE
YGVVACNLGFSQTDSGAIRAGYLVGDDGFEQEILVAKSDLYRGRDLTPEQKQKAMTYVRDCLAESSEIRGARD
KSLADFKTRFLEWYQTAKATTFGEDAVPEWFRDRMEHFHLWRSPARVREMMLHWASNRWAELDDPESRWPDSR
GLEMMSTWVDEDTKAEVKESSLRNKALGDRREAYRIVAATLAKRYKTLLIDDTNLKHLQDGPEPEDAEGDIPA
VKYQQRLAAGSELRQVLINAFGGTNVVKMKPSNMTVTCSGCGARDVSWDRADGFRKHRCSACREIWDQDANFC
RNLLKEYASGGEAPAAKIAKPSRSQRFHESRKKKAAAADQQEQG (SEQ ID NO: 224)
>3300006163|Ga0070715_10000067_44
[terrestrial-soil-corn, switchgrass and miscanthus rhizosphere]
MPKKPNPNKRVSSDTRGARIWSYGVLFPREREVNDAIRSLLHQANRYQNCQVVIERVRRQRYRVIRSAASPEL
ARLEQEYKDLGLAIDAEVDTMRAQRASVRRRTTDPVIAAKIKALKAKRAAVNIELKIAREKANAILRPIQDAY
NRHRKPGGVKAAPRTAEKLNAAARQTTLEEDWPELAKQLLRLEDWATRRVKQAREASGLPPGTYLLVDQATAA
TKKEPTDPRPKRFDGTGRIGVQLFDFTPQTLFSRERKQLQIDPLPATQWDTRPGRRKARTELRIDFGGNAFEM
KAAFKMILHRPLPQDASIKWAWIHVTRIGSRLHYSLQLTMRSDTFQLKPGGQGVVAVNLGWRIKEDGAMRVAY
VMDEFGTERELAMPPELRGGFVLAENLRSYSDQHFNVAKKAIGEFVKTDAAPAWLKEQCTSMHAWQRHGRLLR
IARMLAIAEFPDTVLPSGERVRNGMLSELWKRWKEHRLAAVPKLDLFDTYQVITDWARARGATDLKAATLYLW
VWKKKNDHLYNWECGLRAHKQKCRKQLYRAWATELATTYSTILVEKFDLRDTREKSAPEAEQEENPTSLIRSQ
NFAAPSELRDAIVAAAGTGRVKEQKSHNNTVTCHECGHTSDRDRRFEALIQVCESCGVVKDQDKNNCENQLSR
YFSGESPGGGLDPESARNHENSSDLKTDRDAAE (SEQ ID NO: 225)
>3300014498|Ga0182019_10003703_1
[terrestrial-soil-fen]
MKRKTSPIPTKVYKYGLLAPVENVKLVDHAFYLGGKFYNKLIEIERTSRNEYRQERARRFPNHDKVEKLVATL
SDQKKKLSEIIKASKIATKSRNVPPELATEYKTLAAAYKSAKLRQDAEREQCKKDRDFSAWTLTHNEKKNALV
ADARKNSGLMWGTYNAIAASVQQAGASAILDPEFKSYRGEGRIVVQIQGGIYLAELGSDTQLQINLPNLNESL
TRGEWRQSSRTIVKMRIGSDKHKKPIWATFPAVFHRPLPSDARIMSATITRRRLGVFQSSGRYEYHLCISCES
TMFDNEAVRPRLQDPTQQREVREHRGTSTINFGWRQFDQGKDKRLRIAMTNNEVTGLEPLWLPREIILGLQKC
ENLRSIIDMKFNEVRALLTTWLTPHKQDCPAWLAESLQFLHTWKQPDKLDRVVANWGSGMRFPADADIYPVLA
EWRTKHRHLSEWMMRQRRKSYNHRDDYYLKTAARLAQSSSRMVIENFTISKVAVKPGPEVEKTGGNEARHNRT
LAAVSELRSALIHACSKHHCPMDITPAVNNTRRCNVCGKLLDWDPAIKVDRQCPECSNWDQDVNATDNTNDKV
ASGDVVTMVVPAKTSENGEFEAGTISTFGSARKRLHNLEKTLTIQE (SEQ ID NO: 226)
>3300001131|JGI12631J13338_1000296_13
[terrestrial-soil-forest soil]
MPVTALPDGTISTARYAARGPVPAPVTEELRLGNWLDNLLTEYELDYEAAKAAAWEEDPHVALLLAAVTAAEQ
AWQAARDESAACKQKLGYAKRTGTPARIAAAKAAAAQAQQAYRAAVKARQEAAAALRDIKGLRWHVAKAAINA
AAEERDRKIAATYGPYRDRGGYWANWAEHAKHHKTAAKRVRDMRKQGQPAQLRYHRFDGTGTVVVQIQRELGV
TPEIRAQVTALKAAGRTPGQIKAETGVRAMTAAKMKPEGAVKEGDPPCTAAALADETGKWRSSVRLTPELPAG
FEELPRGERRRIASQGMFAIRTGSAANLAVSVVPVTVHRRMRGDGDVKYAKLTVTRNGPDKDMSVSLTQRVPA
PQPRAGGRLVCVHAGWRALPDGSLRVAVISGAGPLTPGLAAPGGRDARAGELTGVVRDLGDGCHEVVIPARWR
DQDAATAKTRSVRDLARDTAIAAAADWLAASPRYETTDGEPLPAAHEVRRWQSPGRLAVLGQRAARGDYGDDA
AGLGELIAGWAVPDLEAWRREARGRRHLTRRRDDAWANVAAWLCTGTREVRVDEWDIRAVTRRPGPGETDDPQ
AAAARANRTLAAPGALRQRLTITAVLAGVTVTVLDPPDAGSVLQVHAGCGGVLDRDARRESIVVQCPGCGARV
DQDVNMVRLMAARQPSA (SEQ ID NO: 227)
>3300001593|JGI12635J15846_10002852_1
[terrestrial-soil-forest soil]
MPVTALPDGTISTARYAARGPVPAPVTEELRLGNWLDNLLTEYELDYEAAKAAAWEEDPHVALLLAAVTAAEQ
AWQAARDESAACKQKLGYAKRTGTPARIAAAKAAAAQAQQAYRAAVKARQEAAAALRDIKGLRWHVAKAAINA
AAEERDRKIAATYGPYRDRGGYWANWAEHAKHHKTAAKRVRDMRKQGQPAQLRYHRFDGTGTVVVQIQRELGV
TPEIRAQVTALKAAGRTPGQIKAETGVRAMTAAKMKPEGAVKEGDPPCTAAALADETGKWRSSVRLTPELPAG
FEELPRGERRRIASQGMFAIRTGSAANLAVSVVPVTVHRRMRGDGDVKYAKLTVTRNGPDKDMSVSLTQRVPA
PQPRAGGRLVCVHAGWRALPDGSLRVAVISGAGPLTPGLAAPGGRDARAGELTGVVRDLGDGCHEVVIPARWR
DQDAATAKTRSVRDLARDTAIAAAADWLAASPRYETTDGEPLPAAHEVRRWQSPGRLAVLGQRAARGDYGDDA
AGLGELIAGWAVPDLEAWRREARGRRHLTRRRDDAWANVAAWLCTGTREVRVDEWDIRAVTRRPGPGETDDPQ
AAAARANRTLAAPGALRQRLTITAVLAGVTVTVLDPPDAGSVLQVHAGCGGVLDRDARRESIVVQCPGCGARV
DQDVNMVRLMAARQPSA (SEQ ID NO: 227)
>3300009813|Ga0105057_1000075_5
[terrestrial-soil-groundwater sand]
MEDAMEADQTPATAEPAAGAVIVYRCGLRAPLDWGRDCDDQLYLMTRLWNTLVEIEHAHREAYFAATASDPVV
AATEAEITGLERLLEQLYAQRAELRKAARKRVRTPELDERIAELKAKLKARRAEAKEARKAARETIKPQLETL
EAERREAVKVARNASGLWWGNYNAVCADYDRARSAVIKRGGKLQFRRHDGSGRLVNQIQGGMSVADLLGRAHS
QVQVTGGAWAVNARGHLTATVYTRTAAAARAAGAGGTRRTVTWPLQLRRPRPGPYAQARIKEVVITRRRRGHK
FDWHVSFLCQLPATEPALPAGRACGIDVGWRRLNDGVRVGTIVYSSGEREFVVLPERLVAAARRAQDIASRRD
KIFNDLIVSWRAIDWTNAPEELAATAVRLQKSKLSPPQLHGLVYAWRRHPFFAPDAFTVADRWLAEDKKLWET
EASLARHVSNARRDLYRGAAKRLVATCGLIGIEDIDLAALARRKTPAGGDNEIAQATAWWRRIAAPGELLAAI
SHAARRDGALIHKHSGKSTWICAQCGTESMPSDRSQLVHTCPHCSHTWDQDVNAARNLLAAALASAPVTLDGP
AALAWEKPRDPNDLEE (SEQ ID NO: 228)
>3300009813|Ga0105057_1000075_5
[terrestrial-soil-groundwater sand]
MEDRMEDAMEADQTPATAEPAAGAVIVYRCGLRAPLDWGRDCDDQLYLMTRLWNTLVEIEHAHREAYFAATAS
DPVVAATEAEITGLERLLEQLYAQRAELRKAARKRVRTPELDERIAELKAKLKARRAEAKEARKAARETIKPQ
LETLEAERREAVKVARNASGLWWGNYNAVCADYDRARSAVIKRGGKLQFRRHDGSGRLVNQIQGGMSVADLLG
RAHSQVQVTGGAWAVNARGHLTATVYTRTAAAARAAGAGGTRRTVTWPLQLRRPRPGPYAQARIKEVVITRRR
RGHKFDWHVSFLCQLPATEPALPAGRACGIDVGWRRLNDGVRVGTIVYSSGEREFVVLPERLVAAARRAQDIA
SRRDKIFNDLIVSWRAIDWTNAPEELAATAVRLQKSKLSPPQLHGLVYAWRRHPFFAPDAFTVADRWLAEDKK
LWETEASLARHVSNARRDLYRGAAKRLVATCGLIGIEDIDLAALARRKTPAGGDNEIAQATAWWRRIAAPGEL
LAAISHAARRDGALIHKHSGKSTWICAQCGTESMPSDRSQLVHTCPHCSHTWDQDVNAARNLLAAALASAPVT
LDGPAALAWEKPRDPNDLEE (SEQ ID NO: 229)
>3300014489|Ga0182018_10031574_1
[terrestrial-soil-palsa]
MIRVYQFALRTPVDNEPLARAQLLAAHRYRNQHVAIERGRRWAVRLCEASEEVDEAVALVQSATKSTRKDALK
DLRAARKAARETHADELARIAELDAEIRRNARSHTSSYWGSYLTIEQSSDQVRRMPIYEPDGLTPSDPRFVRW
TGAGQIGVQLQGGALTPDVLAGRDTRIRLIDGVLWLRVGSEGRDPIWAKWPIVQHREIPSGADWKWARVSLRK
EGPWERWSCEITLEIPGEHPRNLDKDPQGAIAVEVTWDKPGDALVVARWRDDAGRTGTIELSEYDEQGIRKPD
GIRSVRDQLLNDLKKRLPRAYAECRGDLGPPWLGEAIDGAQYWRSQSRAHTLLTRWRAEKCDAARAAYEILDA
WWLRDMHLWEYEAGARGQALRRRREKYRVLAVTWSREYRHVILDDRVLSREARFGDASDLRFTAGPSELRQCL
EHAFGGRNGGNVTTHPVRDDAAKSETEERDWCERAIDAWIAGGARATKKVSESTGVKGGAWSLRKSKKSQKQA
ENGTAREPVAKGAV (SEQ ID NO: 230)
>3300014501|Ga0182024_10047267_8
[terrestrial-soil-palsa]
MSKFRVYQYGLKAPTENAELVREQMFLAHRYHNTLIEIERGRRGAIRTLTRGHNATIRQLEADLLEADALVGK
IVREIKTQHSETRSRLSTQTDKEELKVARQKKKEIKSQLIEARYLDKNNPSIINERTNINDLAKEAIKSARKH
CGVYWGTSQLIDDAVEASRKMPLYNGEKDNDPSFKPWKHQGSVGVQIQKRDDIQGMDVKNVFGADTCFRIDCV
NEGAFYAEKRGDRRKQRKTTMRMRINSDDKGKPIWSYFPMTMHRPLPDGGIIKKAKVRLKKIGSREEWSLSIT
VDMSNVLMTTNNNHEAVAIDIGWRDMKDDNGQTTGFRMCKSRGTDGKIEEIKLDPKIISAIKKANELRGLRDD
NFNKERASFVAWAKVNVLPDWLVKETKTIAQWRSISRLVKLFKQWKNNRFDGDEVIFGVSGKWNKGDKSVITG
TGLAGWAYHDFHLWNWEANQRTKAIRRRKEFYRVEASKLAKQYQTLVLEDFDLSDVSQTAEPEAEDDNQRGRS
NKTISSPSEFKLALINAFDARNGKIEKVNPKGTSYICHLCKSKEHLDSTFHIHTCSKCHQTWDREDNATANIL
TLWRERLSDEQNAVSARKDENGNENKGVEETRYQRRNRAKQEKKARLETARNAEANIAE (SEQ ID NO:
231)
>3300014501|Ga0182024_10150440_2
[terrestrial-soil-palsa]
MIKTEKYGLLSPTLNADLVLLEMRKAHDYQNNLIEIERWRRDEIRKIESIYGNIPQLTIDYDIASNDYETILK
TKKKNNSNARANVSTPELNQQLKDAKSKRKACENKLKQARLSSRKDDKIKKAKDNISILENKKQSLLRKSDAA
PWYGTYMLIDHAFGIPSAKGKTKGMPLYNGINPNNPIFRNYNGEGRIGIKQFQPYEPINKIININPTSKFLQI
VPIPPPKLKKDGSQRKIGNKNLKLLRIRIGTGEKNAPIWAEFPMVYHRPLPSNSVINMVQITKKIIASREKWA
VSISYEDNIQFSKNEIKKVVAFDLGWREFPDRIRIACWKDNDGKSGEISLPIGLGIKKDSNDKIIKNKDGNDK
LFHSTINKLRKVKELKSGRDLDFDRVKQLFGYFVNSGIIFPQWFQDWLNTTNKNGKKINDITYISKWRSQTKL
SKLILQWKNNRFTGDEDIYMWLEYWRYHDFHLRDYEYNLRNKSIGAIESLYKNTAAHYANNYDAAIFEDINLS
NIAKGKVGSTNRQLTAPSKFRNACKNAFNMRGKCYEEIIARNTSRECAVCHVLNDIGGKLEYFCSGCNVELDR
DENAAENILERGRKKLSDNNTYIDSHENCEHDSNAKNAVGARIDENCNENNNLQYA (SEQ ID NO: 232)
>3300001356|JGI12269J14319_10001968_12
[terrestrial-soil-peatlands soil]
MTRRVYQFPLRAPIEGAALVRAQLRAAHEYRNDLVSIERGRRSALRAVDDVPAVREAIAVVLAATKSTRRSAI
ALLRDARKEARAKAADELVRIGVLDAQARRDARAITPTWWGTYLDIEAAHNQARSAPLYEPDAVTPSDPAFAR
GPRLGREAFAPDDARAAWWLGDGQIGVQLQKGLPTPGALAGADTRVRLVLRPADHPRDRYGTLWLRVGSEGRD
PVWAQWPIKLHRAIPDSAIWKWVRVSVAREGTRERWSVEITVDDAAPRPRDLDRSLAGAIAVEWEWSLLDSGA
IRVARWADTRGGSGELLLPERIATGIRKPDGIRAVRDLELNALKDSLQQALREASDVATPRPPWLADAASTLH
LWRSPDRFRGLLYRWQRERYDGARSAYEMLEAACHRDDHLYDYEVGARRGALGARRDLYRCVAARWSQSYRTV
LMSDQDLSREARWGPESEVRFTAGCFELRSCLRNAFGDADAIDSRWRDAPGEQEDREWCERTRDAWSAGGARG
DGRFAIRKEKTTNAWAARKAKSKAKRGGDEASRDPDGKGAE (SEQ ID NO: 233)
>3300007533|Ga0102944_1012316_2
[terrestrial-soil-pond soil]
MAGRKKKDAPPSRVWIFGCGEPVDGAELVRDQLFETHRYRNDLARHVLNSRQVYREARSEICRVAALEQEHLE
AKEALDVLRQEQKAWSAAARRRVQSPELQQAIKDAKQKKRDVLERLKQAREEVEQDPELQQARAEINKRAAAE
KKRLYNESPAVWGSRLRVDESWLQMRWGRMDPKFRRFDGSGRVVVQIQKGMSVAQAFECKDTRFQLARPTRDW
DRRTGRRGGTRTMFRIRVGSEGKRRTPVWATFPVTLHRELPEDAQIKWVEVRAVRQGPDLRFQLHLTLEWHGF
DPRSRGAGAVSIVCGWRAMHDGTVCVGRWIDDSGRSDVLVLPADVGEAEKHASSLRSISDLHFDAARRVFKSR
RHLLPAWVTEESAYLDKWRSHARLAKIVGRLTAEILGDEAAHVWRQWRRYRQREGLDLHAPYEELSTWLSEQG
EVDPARQTAFYLEWWRRKNRHLHRVECNVRTKALRRRKAIYRNWAASFARRYETVLVDDFDLRQFARNAAPEE
DARQDYLHGVMRLAAPGELRLAFLHSLGGARAVKVPATEGLRRCYLCGSPMRRPDRSGTVEHDCGVITPWQTI
RGLDMLRGAGVDTVAAEQKLLEGHEAMKKLFRELARKG (SEQ ID NO: 234)
>3300005903|Ga0075279_10000001_30
[terrestrial-soil-rice paddy soil]
MSETDTMAFKFRILRIVSDEARIKREIREAHQLYNDLVAIERKRRDDTRLFWADRGGYADKLAGLRAAAEDAE
KAAALTAKGDAGKKERQEIWAPVDTLKREIWELQRKTEEELSDPAKVRRKQRARELQAEAKARAGKALKKEAL
AALLDAEPDCMSPRDRRRLELVREYEARGVAVSGKAVAQRLRDEGLVGPTEQIEEAARKAGYEAYLKRGVSPG
TRAIIADAFERSLEDLEPWATQRFSRWDGHGSFGVQVQGGSLTEEVYSGEHTQVRLRRLEDTGKHREGSRRSG
RRHELRVRIGSDGRAPVWAVFEAIVDRPLPPEASIKRVVVTCDRLGVLDIYHVVFTCSVPSSVYHKRSGEQRG
TVAVDFGWRSLGGEEMRVGYWVNDRGESGEIRLPGVGVARRGTTGKNSPYEPKIRGQVPIRQLDKHTRDLTEI
MAREFAEYDGGKICGGALRDVASWLSANVSIVPEWLTERTTGIHVWRSQHRLYWLAQDWKAQRFDGDAEIFER
LSAWASDWAHLAEWERRQHAAILAARNEHYRLVAVGLAKKYERIVINGADFAAAKRRKTKDETDRLVMIDDRS
RSQAHLAAAGELREEIVRSAKKWQAIVMKAKPNKATCHACGSTCVYDAAKDLAHECEHCGVRWDQDENCCRNM
LCEWSGDGQTAGGARVSPNAKKSGEVLRSKKRDEDGGPIGEAAE (SEQ ID NO: 235)
>3300005524|Ga0070737_10002282_10
[terrestrial-soil-surface soil]
MSTGTVPPAAGNTPPTGEVTVARRYGAKPGPIPAAIREELDRAHWLVNRLVEIDRECDEQVTAVWEADPQVGP
VLAAVRDAEDARAAASEELRRAKVKLGAVKSGRSRTGLDVARARVDAAREAVRQASAALKQARDRAGAVKQER
WPAAAPVIRAAQEARDAAIRATYPEFVARGGYWATWNDITGAHKRRRDRVQQLRRQRRPAQMRYKRRDGTGTL
TVQLQRQLGVSAAERAHVTGLRDAGLAPSQIAALITAGVPAAEVTPARVARLRAAGLSAPEVTQALVAGADPA
AAAAASRTPGKAARRAALGEVLAAAAAARPPRTPGRRWRPQSVARVRAGGKDTPGDPPFTPDVLAGPAGPAAL
QVRPVLPPGYPQLPRRQQRALARQGEVVFRTGSAANAAYTTIPVVLHRPLPAGGDVKMGRLTVTRCGPDLEQS
VSITARVPAPPPAAGHTAAVHIGWRALGDGAIRVAVITGPRIPPPRQLAEAGVVRPVGGCWEVVVPPRWQVAL
TRVDGMRSARDREWQQVRDRVAAAIPPGHDTLPPPAQVRAWRSPGRMVTLAAACEAGEHGGHGRAIADLVTPW
ARRDRAAWRNESRARRRILRRRDDAWAVIAAWLTAGAGTVIVDDWELPPLGRRPGLTEEDDPQWRAARANRVL
AAPGALRARVRVTAELAGVAVAEFPVPRPGQAHAGCGHPLDPDARREDVLVPCLGCGVKVDQDINMLTLMLDG
AREGAPQAG (SEQ ID NO: 236)
>3300005524|Ga0070737_10031205_1
[terrestrial-soil-surface soil]
MTAYSYGCPAWAVPLAPRETDPVTVIAALAGTAQALRQAQAALPGGGEREWKRWAQALQARDQAREAVWVTGE
EALAGQLRLACRLWNRLVEVTRGHERARAAVWASDPAVAAAQETLDAARAAVAACHERIRVSRQADRTTVPRD
ADKQALDEARAAARAAREARDAAREAAFPRLRARFAAAAQARLAGVKAAAAEATEAGLGWAACNDITWRRFPA
ALQKVDRERAAGRPAELRFRRWDGTGTVTVQVMGGAGIPPRTLPALNSGRHPRSAVMRLQPWRDPSAGRPKGA
DRHGTLTLTAGRSRRHGPLRLQIPVVLDRYLPADADIAEVKVTRFREGTRHRLRVSAACYVPAPPGPPPGGAT
VAVRLSWRAAGGGWVTAAQVGSSSPLPPLPRSLEHAVRGTAGGPRLPLVRVAPGSLSAEVLYYAGWRRLLERG
EATQAVRGQNTDILREKVTAALRDDPALAAAVKVTAGEVARWRAPRRFAALARRWPAGHPLRPLLEEWRRRDR
HLQDYQACETAQVLAARRDAWRCTAAWLCAGASAVVIDGTRLDAEKQAPGDDEEDPEGARGARRLLHRSAPGE
LRAAVEAAAARRGIPVTILKAAVEPAAGGGA (SEQ ID NO: 237)
>3300005524|Ga0070737_10031205_1
[terrestrial-soil-surface soil]
MTAPGGEGTPARVMTAYSYGCPAWAVPLAPRETDPVTVIAALAGTAQALRQAQAALPGGGEREWKRWAQALQA
RDQAREAVWVTGEEALAGQLRLACRLWNRLVEVTRGHERARAAVWASDPAVAAAQETLDAARAAVAACHERIR
VSRQADRTTVPRDADKQALDEARAAARAAREARDAAREAAFPRLRARFAAAAQARLAGVKAAAAEATEAGLGW
AACNDITWRRFPAALQKVDRERAAGRPAELRFRRWDGTGTVTVQVMGGAGIPPRTLPALNSGRHPRSAVMRLQ
PWRDPSAGRPKGADRHGTLTLTAGRSRRHGPLRLQIPVVLDRYLPADADIAEVKVTRFREGTRHRLRVSAACY
VPAPPGPPPGGATVAVRLSWRAAGGGWVTAAQVGSSSPLPPLPRSLEHAVRGTAGGPRLPLVRVAPGSLSAEV
LYYAGWRRLLERGEATQAVRGQNTDILREKVTAALRDDPALAAAVKVTAGEVARWRAPRRFAALARRWPAGHP
LRPLLEEWRRRDRHLQDYQACETAQVLAARRDAWRCTAAWLCAGASAVVIDGTRLDAEKQAPGDDEEDPEGAR
GARRLLHRSAPGELRAAVEAAAARRGIPVTILKAAVEPAAGGGA (SEQ ID NO: 238)
>3300005534|Ga0070735_10023967_5
[terrestrial-soil-surface soil]
MEKRESTVVTIAPVRMCGTTIRVYRYGLAPPLDWDDECDAEMARLDRFYNALVEIEEAAQAEYRRLSSSDETA
LLETRIAAAEEAKDWGAAKALRAALKEIRAALRKANAAAIDAAEEKRKADAKAARQNCGAYWSSYNAVIRSVE
LARQKAIKEGAAFGKRTHEPGKGDWRMTVQIQGGASVADVLGGKNSQLRIAAPAHFGALRDRPAGMSRKACRH
GRVTMVVHNTGGLRRVTWPLMMHRPIPPEAIIVGAEIVKRRRLGSRWDDWHLCVTVREPAPAPHESPDCAGVN
IGWRRLSVERGLVIDGAGLRIATIWDGATLNHVILPEEIISAAWRCDELTSAIDKRVDAATARIFKDSPDHPV
ARQLGDTFVESGRLRVRDLWTFANAMTPAPDWLLAMLRACSRDRRERAGLLRRMARRRRDIYRVAAKTIAENY
GRIAICAVDWAKLARLRESGKDNPLPPPARGYRKIAAPGEFEAELRRAIKARGGTIMDIKDSVSFLCHACGKE
HAPSERSAAHHTCPSCGATWDQDRNAAMNLFAALDSSGPAAIKPADSLENGKGEMQSTAYVGRFQRRAKQAQE
AKLANKEALENASELVDETIGCK (SEQ ID NO: 239)
>3300005542|Ga0070732_10013271_3
[terrestrial-soil-surface soil]
MIRVYKYGLLPPTQNINLVRDQFRAAHEYRNLHVEIERGRRAAVRELFDTEEIRIASELLSRSSGTERLPIYK
SLAALRSKRLKESSVRVDEIEELAAGLRRGARALTRCYWGSYLTIEAASDQVRKMPLYGRDGITPNDPRFIYW
SGESQIGVQLQGGLTIPVLHGARDTRLRLERVSLEPARGRHPASRCRMLWIRIGSEGRSPIWATFPLRYHREL
PTNATIKWARVSLRREGLREEWSCEITIDIPGAHPRTLDTSLTGAIAVSLEWTAAVNELLVARTLDCQTGEYD
ELRLPARMVTGLRKPDGIRSVRDKNLNELRPRLIAAFKEPMAPWLAAMVARISHWRSPDPFHALAMRWRREKC
DDAREAYDVLQTWELRDAHLWDYEAGSRREALRERRELYRVWSAKLSRRYKTVVLSDADLSVEARTTKEVQTD
RQTAAVYELRQSLRNAFAGEESMGPGSNVQELCDRWNGEQTAGNIRNGEKSNTFEEAKGGAWAKRKAKKSSAK
SILDATRQG (SEQ ID NO: 240)
>3300010373|Ga0134128_10000310_109
[terrestrial-soil-terrestrial soil]
MAFGNVAKPSRIYTHKSRPPHEGAQLASDQLYRAHQYANALIETERQRWNATQDLMRSMFPRIAELEARIDAI
NAAIEAKNAAVKHQNQAARSRTATAEDRAEVKQLQSERRDAAKELTAERHRQTGVPKPRKEAWERIHAVINAT
TRDEKERKALRKAAQAAIDAGESPAPLTAEEDREAFGDPEYRRRRAAIDETANADRRAKRAVCEVYWGTYLCV
EGAVDKSVEDCAKGQPVRNGKPPVPPGPPRFRRWSPEGKLGVQLQGGLSWLDALAGTDSRLRIELQPLAARPT
VSKSGKPLPLADPNSRRSRENSQVVVWARIGTEEDGRSPIWMKTVAHLHRHPPADAVIKWVYLQRNLKGVQTW
WEAQFVFEREEGWAKDRETLRGEAAIDLGWRKVADGLRVAVLIDDDGERMECVLPDSWLESWAKAQSIQGFRD
TEFDAIRPALVHWLKARREAGTLPEWLGEATGSLHQWKSCERLGKVVWQWKDQRFDGDEAMFERLVEWRNRDR
HLHNYARGMEETAVRRRDEHYHRWAALVRRRYALVKVEDTNWREMQHRPEATDDGKNATIGAFRCAAVGRLLE
TIQEHVWNVVAVEPAWTTKTCHACGHVDDFDSAKELVHTCSACGEIWDQDDNAARGLLKGRVLKWLTREGRKL
PKAERVRDVEAAV (SEQ ID NO: 241)
>3300010373|Ga0134128_10011458_1
[terrestrial-soil-terrestrial soil]
MFGHESKPSRIWSFKARPPHEGGGLVTEQLRLAHRYRNALVALARRKHEDTEAALLRYRPRLGTLFGLASSLS
EAFSAAEDSVKARSVAGRRRDVLRGDERKAHAELRRAKEGAWAAYRRERSAAFRVPAVRSELDAIDAAFYSGW
RAARGVAVNEWGLYWGTYLPAEAAFNQSLKPPGAGKDDASVSAKENIRKRWGPPEFRRRLRGEEFVGHEGAVT
VQLQGGLDWYAAKLGNDTKLRILPVPAGLTPTTVTRPAFTRAERDRIKRLRREASLVRKELGRLGTPADPGGG
DIDGRRSKLVAWGHSVRGEIARIRAGATLRTTPLPPPDPGSKRSRAGRRAEVWVRVGSRGPAGREPAWARAVA
YIDREPPPGTVIKWVHLRRTLAGRSARWSVQFVLSRDSWDAETAAAGAAGVDVNWWMTPVGLRVATAAGSDGS
VSHLFVPNDVVDAWRKHESLQSIRSVNADAARAHLLAFRSSGVRLPGWFREASAYAHAWKGGAKLAELVWAWK
GRRFPGDAVVYARLEAWRKQDRHLHDWHGAQHDKVRRIRNDLYRKWARGLARRFRLGALKDTNYAAVRRAAPA
GEEDKGFTRLYSGIASPGLLSRYLREAFAECAELPANNVTRECHGCGMVNAFDQARVRFHACQGCGASWDVDE
NAARNLLRRAAGARREAI (SEQ ID NO: 242)
>3300010373|Ga0134128_10096594_3
[terrestrial-soil-terrestrial soil]
MPTKVYTYGAKLPIHGLELLDDSIIHGHRYYNALIALNRARAEKIDALRHQLIPGLDDAEAAVVAAESGLEDL
RAAVRQRNAERRTKTATPEDRQAIKAAVASLKEAKAIRKEIRSRCRDCVEYKESLDKVWNDFSEASKAAYNES
PCWWGTKLHISQSVERAVESSAKIGGVPRFRRWEQVRFDPAAGDDGAFVGAGDGVAAVQLQGGMTVEELLAGA
DWRLRMEFVADGKRTSLRAARKVIFSLRLGSDGREPRWVRIPAYYHRGGELPVDAKIMWAMIVRRALAPRRQR
DGSWRPWYEYSVQLTVRTGEARPTADGGICGVNLGWRTKPDGSLRVAVAVGGNQETHECVLPAHMLAGWKLGE
TLQGHRSVNFDRIRAVLADWLRGSTEPPLGLEVSAVELDRLATLANVAEDADRFRRGARTLRAWAANWTRPAD
LPAWLTTESQYVGLWKSHARLAQLLDRWRSQRFNGDEAAFSALMVWREREAHLQQWETALRKRLDGQRKDIYR
KFAARLARRYQVVATEDTDYRALKLRKPAEDNADDAAVKEHMRHGAPGLMRQYLRGRAAVELRIKSKDISRIH
IDCGGINSEDRRPSILIVCPHCKVEYDQDVNAARNVLARAEVVNETPGAAREAQPKETGDDTLNDGGKRGRWS
KRKADRSRKQVESAAQQ (SEQ ID NO: 243)
>3300010400|Ga0134122_10000107_57
[terrestrial-soil-terrestrial soil]
MPIRVFEYGLKAPICNGPLVEQQMRSAHTYRNLLTQMERERRQEVRTIMAAHPDMAPLEARLAEIVTQRDEVR
KAITTSRGITRSRSESPELRALARELGKQIREIRAEIKANRQAVAAAVKTDLDRIEIASVRRIKEARAACGVY
WGTYLLQEADADRARQEAFPPQFRPWRGEGRVSVQLQKGLSIEELHGDDTQLHIDPVPPAAHDIGTRRGDRRR
ARRTMLRMRVQSDGRQPVWAVWPMRYHRPLPPGSVIKVATVSRRRHDCRSWDWMLHITVEIPDAAMKPSPASG
VVALNLGFCLRPGGTIRAGYIVGSDGVEQEILVPRSVIDAISKCDSIRSIRDKNMDAMKAQMGQWLATVRATH
EKIVQEIAARPPPADVDSAWYRFCAYWSMNGPAWPAWFAEATATLHAWRSADRFRRLAFRWRDNRFVGDATGF
RILEGYSDQRFHDERDAWRYRDEHLERYESGMRRRALLRRRESYRIAAARLSATYRTLLIDDTDLRDFQRSPA
PESESIEITRIKRNRGLAAGSELRLTMVNAFNGLSGRVVKISPATKPCHACGVVNTWDRTEDREHTCTACHQR
WDQDANACRNMLLAHERDQATDADAPSKKRLSRSERLRKNRDAPKAA (SEQ ID NO: 244)
>3300010401|Ga0134121_10002041_17
[terrestrial-soil-terrestrial soil]
MQRKTTTAPTRVYSYGCSFRGVTKNADLVEEQYRRAHAYQQKLVELELQRRAAVRAVLATDAGVVKLAEVVAQ
HEKALTDDLVAAAAIKQATRSKKLPPELRDRLAQTKQDLRAARDAWKAARRLFATDPNTKAALDKTNTDHVVA
VKAARAASGLAWGTYLILERAADQQRNEKMDPKHRGYTGEGRLAVQFQGGTTVAGVFGGEDTRMRIEPKPGGS
RKRHICKLRIGSDGRAPIWAEIEVFIHRQLPADSRITWARLKRTRRGRDYLYDLQITLESQTFAGVLQDMAHR
RVAVDLGWRVTDKGAGGLRVAYWRDSDGRHEELRLPAKLLSSLDYPDQLLGIETNWFERAKAKLLAWRADVVL
PEEHRSYTGTLAHWQSPLTLASYVWWWREHRFAGDELIFATMDEWRVRRFWHYRDWRMFQRDKALAARKDFYC
VFASKLVVDCKELVLEDFDLSAFATKDTGPSAFRYWRRTGAPSELRLCLIAAAKKVGAKITLVDPAMTTRRCQ
ACGSEEPWDQKTETVHTCKTCGTTWDQDDNATINMLASGSMVSGTSESLDPAE (SEQ ID NO: 245)
>3300004633|Ga0066395_10000027_32
[terrestrial-soil-tropical forest soil]
MPITRIYRYGLLEPFLGAELVAEQMSLAHRYQNSLIELERGRRERVRAIMLGAPSLEEAQAIVDRAVKDLLDA
RQKIKDVRKAAQRRAETEADRASVSEIVVRLREARRVLKETRAAVRADSAIALSIAGVNDEIAEEQKRRRAAC
GVYWGSYLLVEQAMDAARKAIVDPRFRRWDGSGRIAVQLQGGLSWADACAGDTRLRVDLAPRAVGKGKPRPTV
SLRVGSNGRDPVWASWPIILHRPVPEDATIMWAAVHRTILGGKARWHLLLTLRLPDDFVVEKGGKGTVAVDLG
WRQRENGLRVGYMRDDAGDAGEILLEPAIVDGFKKVDDLRSIRDKRIDVMRPRLAEWLRERELPDWLAAERAT
MHLWKSAARFSRLAEIWRGKRWDGDVEGFDLLWAWRAKDRHLWLWEANLRDKVLARRLDRYRVLGAELARKYH
TLVLEDFDLRNLQRHAKPESETVEIGPVRGRQRIAAPSLLRQKLVDAFVARGGRVVEVPSANTTRSCHACGLV
EAWDPVTNLMHACTGCGALWDQDDNACRNLLLRERLGADEASEAARPTETEPKTSKWGRLGRHKKRPLASGNA
NE (SEQ ID NO: 246)
>3300005332|Ga0066388_100004304_4
[terrestrial-soil-tropical forest soil]
MLVGWFRYNEARPAGGDVATCNNATMKRSEFNGRVLVYRFRCPVAASNIPEAAETQFRLAHELRNELVAVERA
HADAVAAIWADHPDVAATLQAQAVAEAAVAELVERAGKERIADRAKEPRAQTRAEIKAARATLAAARQDTKAA
RSAAYPLVRPAMADAQTRRRQAIGDAGRGAKTRGLFWHTHDAVLAGHDTAVKRVAALRAEGKPAELRSRRWDG
EGRIRVTLMRHEWSHGCGAQPCGQPSPECPRRQPGDPLRTPALLAGGQGPWRNVCRLPAHMDPAICAEHPPRR
HGERETILLRVGSEEREPIWWELPVFVHRPLPPGADVAFVEVRRERLAGQTRLSVCVTVRLPPVATLTEGAVA
AIHPGWRSVTGGIRVMVIAASRPLGPIPERFAPVVRPLTGNHVEIIAPEEWVRVLGHADSVRSIRDQALDVIR
RKIVDALAEDVPGVEVSAADVARWRSPGRFAALVRQWPNDHPLADVLWAWRRQDRHLWKGEAHERDQIAARRT
DTWRHVAVWLCDQVAVIGHAPTPIAELSRVPVIEDGDDRQATLARAHRALAAPAELVSLIEIAAGQRGVRIVE
IDGARLTATHHVCGEVTGDLARDSVMLWCSRCGIAFDQDANAATASLARTIGDLSSAKVQ (SEQ ID NO:
247)
>3300005332|Ga0066388_100004304_2
[terrestrial-soil-tropical forest soil]
MKRSEFNGRVLVYRFRCPVAASNIPEAAETQFRLAHELRNELVAVERAHADAVAAIWADHPDVAATLQAQAVA
EAAVAELVERAGKERIADRAKEPRAQTRAEIKAARATLAAARQDTKAARSAAYPLVRPAMADAQTRRRQAIGD
AGRGAKTRGLFWHTHDAVLAGHDTAVKRVAALRAEGKPAELRSRRWDGEGRIRVTLMRHEWSHGCGAQPCGQP
SPECPRRQPGDPLRTPALLAGGQGPWRNVCRLPAHMDPAICAEHPPRRHGERETILLRVGSEEREPIWWELPV
FVHRPLPPGADVAFVEVRRERLAGQTRLSVCVTVRLPPVATLTEGAVAAIHPGWRSVTGGIRVMVIAASRPLG
PIPERFAPVVRPLTGNHVEIIAPEEWVRVLGHADSVRSIRDQALDVIRRKIVDALAEDVPGVEVSAADVARWR
SPGRFAALVRQWPNDHPLADVLWAWRRQDRHLWKGEAHERDQIAARRTDTWRHVAVWLCDQVAVIGHAPTPIA
ELSRVPVIEDGDDRQATLARAHRALAAPAELVSLIEIAAGQRGVRIVEIDGARLTATHHVCGEVTGDLARDSV
MLWCSRCGIAFDQDANAATASLARTIGDLSSAKVQ (SEQ ID NO: 248)
>3300005764|Ga0066903_100000051_27
[terrestrial-soil-tropical forest soil]
MPITRIYRYGLLEPFLGAELVAEQMSLAHRYQNSLIELERGRRERVRAIMLGAPSLEEAQAIVDRAVKDLLDA
RQKIKDVRKAAQRRAETEADRASVSEIVVRLREARRVLKETRAAVRADSAIALSIAGVNDEIAEEQKRRRAAC
GVYWGSYLLVEQAMDAARKAIVDPRFRRWDGSGRIAVQLQGGLSWADACAGDTRLRVDLAPRAVGKGKPRPTV
SLRVGSNGRDPVWASWPIILHRPVPEDATIMWAAVHRTILGGKARWHLLLTLRLPDDFVVEKGGKGTVAVDLG
WRQRENGLRVGYMRDDAGDAGEILLEPAIVDGFKKVDDLRSIRDKRIDVMRPRLAEWLRERELPDWLAAERAT
MHLWKSAARFSRLAEIWRGKRWDGDVEGFDLLWAWRAKDRHLWLWEANLRDKVLARRLDRYRVLGAELARKYH
TLVLEDFDLRNLQRHAKPESETVEIGPVRGRQRIAAPSLLRQKLVDAFVARGGRVVEVPSANTTRSCHACGLV
EAWDPVTNLMHACTGCGALWDQDDNACRNLLLRERLGADEASEAARPTETEPKTSKWGRLGRHKKRPLASGNA
NE (SEQ ID NO: 246)
>3300010047|Ga0126382_10001209_14
[terrestrial-soil-tropical forest soil]
MDNAAYRVLVGWFRYNEARPAGGDVATCNNATMKRSEFNGRVLVYRFRCPVAASNIPEAAETQFRLAHELRNE
LVAVERAHADAVAAIWADHPDVAATLQAQAVAEAAVAELVERAGKERIADRAKEPRAQTRAEIKAARATLAAA
RQDTKAARSAAYPLVRPAMADAQTRRRQAIGDAGRGAKTRGLFWHTHDAVLAGHDTAVKRVAALRAEGKPAEL
RSRRWDGEGRIRVTLMRHEWSHGCGAQPCGQPSPECPRRQPGDPLRTPALLAGGQGPWRNVCRLPAHMDPAIC
AEHPPRRHGERETILLRVGSEEREPIWWELPVFVHRPLPPGADVAFVEVRRERLAGQTRLSVCVTVRLPPVAT
LTEGAVAAIHPGWRSVTGGIRVMVIAASRPLGPIPERFAPVVRPLTGNHVEIIAPEEWVRVLGHADSVRSIRD
QALDVIRRKIVDALAEDVPGVEVSAADVARWRSPGRFAALVRQWPNDHPLADVLWAWRRQDRHLWKGEAHERD
QIAARRTDTWRHVAVWLCDQVAVIGHAPTPIAELSRVPVIEDGDDRQATLARAHRALAAPAELVSLIEIAAGQ
RGVRIVEIDGARLTATHHVCGEVTGDLARDSVMLWCSRCGIAFDQDANAATASLARTIGDLSSAKVQ (SEQ
ID NO: 249)
>3300010047|Ga0126382_10001209_12
[terrestrial-soil-tropical forest soil]
MKRSEFNGRVLVYRFRCPVAASNIPEAAETQFRLAHELRNELVAVERAHADAVAAIWADHPDVAATLQAQAVA
EAAVAELVERAGKERIADRAKEPRAQTRAEIKAARATLAAARQDTKAARSAAYPLVRPAMADAQTRRRQAIGD
AGRGAKTRGLFWHTHDAVLAGHDTAVKRVAALRAEGKPAELRSRRWDGEGRIRVTLMRHEWSHGCGAQPCGQP
SPECPRRQPGDPLRTPALLAGGQGPWRNVCRLPAHMDPAICAEHPPRRHGERETILLRVGSEEREPIWWELPV
FVHRPLPPGADVAFVEVRRERLAGQTRLSVCVTVRLPPVATLTEGAVAAIHPGWRSVTGGIRVMVIAASRPLG
PIPERFAPVVRPLTGNHVEIIAPEEWVRVLGHADSVRSIRDQALDVIRRKIVDALAEDVPGVEVSAADVARWR
SPGRFAALVRQWPNDHPLADVLWAWRRQDRHLWKGEAHERDQIAARRTDTWRHVAVWLCDQVAVIGHAPTPIA
ELSRVPVIEDGDDRQATLARAHRALAAPAELVSLIEIAAGQRGVRIVEIDGARLTATHHVCGEVTGDLARDSV
MLWCSRCGIAFDQDANAATASLARTIGDLSSAKVQ (SEQ ID NO: 248)
>3300010048|Ga0126373_10000093_102
[terrestrial-soil-tropical forest soil]
MPIRVYQFGLLPPIDGEARVRVLMRQCHEYRNELVAIERGRRAALRALHDTQEVADAVALVKASKGKPLREAI
GKLYKARRAAEKAASHCPGVAEASVPEDASDAERSRLRRVNLEARAAAGDAVARITLLDESIRRDARALSPLS
PGAWANYQTIEAAATQVRAMPLYERDAVTPSDPRFVKGPRAGQAFPVSNPKSCWWLGDQQVSMHIQGRTVTTA
DVLAGKDAWVRLELEPARLHGGTNGGKQQYSQYGVLKLRVANDTRCAVWASWPIKLHRAIPNAAKWQWVRVSC
RRLARREVWTVEITLNDPQKIQPRPDVSGAVAVELLWTPLDDGSMRVASWRDSFGATGELLMSSRMVGAIRKA
DGIRSVRDTLLNALRPALAEKIQHSADKLPTWLREVGNVLHLWKSQDRFYELALRWRKDKVDAARDAYELLQE
WELRDAHLLDYEAGSRRNGIGWRNHYYSNWAAGLARRYKAVIVPDRDLSLEARFGDDSDRRTTVSPQKLRDML
LNAFGEDAVKAVWKGPHGVPEDSDDTWLEVVSEQWRNEENTGGACAAEKDNAVADVGGSAWAKRKARARERAA
GKDGARKDVGNTAE (SEQ ID NO: 250)
>3300010366|Ga0126379_10001683_10
[terrestrial-soil-tropical forest soil]
MFGRKRDTAGATIRAYEFGTRPVGDMALASQQLYRRHQLWNQFVEIERDTRAKYRALVATESTQRVAALHEQL
EELRQQIRLHKKSAAYEHVLHGKLRSLVEAMQSALADRSPETVAIVKPRLYFADIVSYDGLRERAKQLRQALG
VMRAEAKAESRAKAEQLKAEREQLERERTDRVKAAMAASNLYWCNSDDVRASYEVARKRAMREGTELHFHRFD
GGGKLSVRYQQGLPVAAAFGTDTRLQIDPIDFSIWESADRAVRRRCWTKARLRIGSNDQRQPVWLTLDCWLDG
RPGRHLPMEGTIRAAAVIRRRVGTGFTHRLVLTVEAPLERRDLAVERHGTVGLDVGWRLTADNGLRVAYWSDG
TAQGALTLPANMVGLFEKVHDLQSIRGQHFNAAVERLQGYLEEHPGAMWLQEQCRYIAQWRSPGRLIVLLRDW
QSDGTDGELLEHLQAWRKKEDHLYSWQANLLDQTAAHRRELYRIFAASLGRYARVAIEEFDLRKVLQKPRPED
GAETPDGHMRTIAAVSVLRSAIENYCRREGVEFVVVPSSGTTRRCHVCQSEQQFDQRSDLVHRCTTCGETWDQ
DYNAAENIRQFADRPAGDTILPSAKISPEAPEARV (SEQ ID NO: 251)
>3300010376|Ga0126381_100020658_4
[terrestrial-soil-tropical forest soil]
MIVHTLYIKTVDSETRKAVLAQMRAGHNYRNELVAIERGRRWALRQAHETPEVAEAIALLKAATRSNRFERLK
ALTRARRQAEEATEKPQVYLACEAARIALRDEAAGTPRKKAAQAVYDAAREALCQSDEFHYAVGERDNWIRKA
AYNDAKCNWGIRAVVNQAFEALRKTGLYERDGVTAWEPRFRRWAPNRPTGTIGVQLQGGLDVKDALSGDDTQV
KLLLNPPIYKGSRQQRVRQFGELWVRIGSDGRSPIWARFNVMAHRALPTDAKIKWVKVHLTRTGPFERWEAHL
TLDASAPPRPITNDRAVAVELLWSPQDDGSITAAHWRDGDGAEGFFALPAIIPTSIRKPDGIQSVRELLLNKM
RPDLVALIKHYGSDLPVWLKEATNTLHLWESPLRFYDLAQCWRDSGFMGAKGAYDRLHEWELRDDHLWRYEAC
ARKTAIRRRRDFYSCLAKNLSAQYRYVILPDRDLSRERRFGEERDIQFTVAPQELRAALTRCFGDETIEAPWR
GAHGVEEDEYGDIDWLLFALEYGRDEKEARAAREAAKSSGDVKLTGGKWARIKAKRKEKDDAERGTRKESGKD
AEGLGGER (SEQ ID NO: 252)
>3300010398|Ga0126383_10032213_5
[terrestrial-soil-tropical forest soil]
MKRQAENVRSMVYQYGTVPARVAPVEGEELALSQMRLAQRLWNVLVTIERARVAGYRSIMRDEVQEQIDALRE
RKDATWQEIKATRQKARAKVATPGLDAEMMRIKTALRLLVEHKQSTKQQRHDARREQLNALAERANQRIKRAR
QAAASMGLFWGTYNAVIQSADAGRKHAGELRYQGFRGEGTVTAQVMGGATPEQCVAGGHPFFQVAPATPGQKW
RYARVRIGSTSERQPLWVAIPVVYHREIPAEARIKSVSATRRILAGKVRWSLNVTVTLPPAEPRPAGQMVAID
IGWRLLPDGVRVAYWQDGTGNHSEVRIADSDIAQFRKISDLRSICDRAREEFLPSLVEWLKPYELDEEWTHRA
RALAQWRSNDRIAALIRWWADHRLSGDAEIYQTAVEWRRQYLHLANWWRNQQEQMTLRVREQYRRFAAGIASQ
FATVIVEDFDLRQVTETTEKAVGTYRQMVSPSLFRAAVINACKREGVEIRIVSGAYSTGACHNCQHIEVWDQA
ASILHRCGACGALWDQDHNAAINLLASGGVVLWRINLVAAIGPLSQDRSQTGGKEAVES (SEQ ID NO:
253)
>3300017961|Ga0187778_10004454_1
[terrestrial-soil-tropical peatland]
MTARVYEYGLLDPTYNAQLVDDQMRAGHRYRNVLVEIERDRRTEVRNLLARHPDVEPLEAELLAARNDLADRR
GQIRLQRKSTRTRSEGASMREAAHAAKLRVAEIRQRVNDAKAAIKEDAVVQAAIATADARAAERVRQARASCA
TYWGTYILHEADVARARASGGEVHFARWTGEGRVSAQIQGGIPSTDLAADTQVQIAPGQSIKDRRVPPNAKIL
RLRVQSDAKGKAIWAEWPMILHRPLPEEGRIKVVTVHKRRRDCRRWQWTVTFTVELLDGWTRGKCGEGAIALN
LGYCRSYDHLKGAIRAGYLIDDRGQEREVIVPTSIIDRINKSEAIRSQRDKDVDTMRALLVAWLRDHEAILPG
WIVDRTILAKAPKDANSPEAPRIWHITAWKSAARFRALAFAWRAARFQGDDVGYDLIERWRYRDEHLQRYEAG
LLRGALLHRRDLYRQLAAELSAKYRTIVLHDTDLSDLQRSPHPEEDRREIGGAKYNQRIAAGSILRGALDNAF
KRAGGEVVIVDDHRITKACWKCSEAEDWNQLDREHICGACGTRWDQDANACHNMLARERAGAEGRRQAARAAK
TADRKETRSERLRRGLATKRKTEAARAM (SEQ ID NO: 254)
>3300017970|Ga0187783_10000008_23
[terrestrial-soil-tropical peatland]
MFGNKSLPSRIYSYGANPAIENQKLVEDQMFLAHRYRNAMVEAEIERRKKVDEKLLSLSPSLARIEEKLAAAT
EELEKLRESIKEDHKLYFTKTAKDPVKTKAIAAQKKLVKGLYTERKALRTKLFASSKWKKEQEATEAEALAAH
KELREKSDLYWGTYLLVEQSMQGSRSGAPPRFMRWDGDGHIALQIQNGMTVEEALSGADTRLAIIPGRVEVDG
SRTKETGIKRKLGTALCKFRIGTDEKTHSPIFASIPFHMHRPLPEDAQIKWVHFIRRRVSTHCEWRLQFVLSQ
KKWVKEDQAQEGTVGIDLGWSLDQEGYLQVACFAGSDGESGRLFLPADWLGEMKRVEGIRSIRDQNFNDAKAL
LQAFLRTSKEKSWLKEEAKTLPQWRSPAKLAWVIQKWRKERIPGDQHIFQAMEAWRLRDKHLYEFEANLRDQL
LRRRESIYRNFAADLRRSYKTARILKLALKEVHELPQAEEAPENPQLREHSRDACLSFLVRCLRESMARTVEI
DPKNQARRHHGCGSLEDLGANEKLHTCSRCGEIYERHENTARNLLGMMPAGAGV (SEQ ID NO: 255)
>3300017972|Ga0187781_10019688_5
[terrestrial-soil-tropical peatland]
MERLPTETSPLDVVEMEREIDEARTATGWPTATVVHRYGIASPHEGADIVHEQIRLARAYRRELVTIERARRA
AARQAMTELAPEVGFAEATVVGADAACQWLAAEIRAARAATRKRAESRGMRDRLTRARASLRTHRAELFALRS
RYATQCADCRKAKSESVPCPHATAEARRLLERVDAVNDQAAAAQRRARGECGVYWGSYLLVERAMQASRAMPL
YADDGVSPNDPSVPHSLSDSLGCQIQSTRPLTVAGAAAGTDSRLRIQPPPWPEAWLHEARLDPSAQSHPSHRL
PGQRPDGTPAPATRADGTPARWVRDRACRQGEVRMRVGANGEWAAWRLDEHRAMPPNAAVKWATVVRRQRGPH
TEWSLCLTLEVPLPEALPQTGRTVAVDVGWRQIGDELRVAAWQDSDGQKGELRLTKADLHALNASAEVRSLRD
GKMESIKQRLAQWSAVASPQDCPEWIREALRTVRLWRNPVRLVRLLRQWREAGEPTRVVPRVAFDHLVAWADD
DRHRWAEQESRRVWGLRRRRERYRVFAAELAKRYDAVVLEQFDLRRVAARPQTGRELESENEVARSNRQRASV
SELRDALRNACRSRGRVVVAVDATDSTRTCPSCGLVADRGQDERVVLRCECGHEWDQDRDGAALVLLRRYREH
PGDAKTLVAARAGATLAEPPKKKNDRWARARRMSTQKKERAQGARDSG (SEQ ID NO: 256)
>3300018064|Ga0187773_10011230_2
[terrestrial-soil-tropical peatland]
MENQGEESAAAVPSEEEAPLDARVYQFGLLPPRVNRDLVEDQMYLGHRYRCQLVEFERDRRDAVREILSSQSG
VEETEARIADLAARRDAARAEIASKRSRSRSRSDSAEERATVREIGRQLKALRAEAKEARSIVASDEHVGAWI
SAENDRAAQRQKDARVACGVYWGTYLLHESDAQRARTGKSYPKFPRWNGDGRVAVQLQGGLSPQKLDHGQDTR
LQVVSSSHRTGRRLGRGSLLRMRVQSNGRDPVWAEWPMILHRPLPEGVRIKTATVSRRRRGSQVDWCATITVD
EPPRPIRATATEEAVAINLGYARRPNGGIRVGYWVGSDGAGGEILCQGSAAYRPRSSEEQTRAAVTHVEESLK
KADSIRSFRDRGMNEMRARLIAWIDDFVGGDPPDGVPWWIADARRHLHLWRSPNRFASLLRRWERGWWPDLDG
GYAILLAWSRRDLHLERYETGMRTTARRDRREGYRLLAARLAARYRTLVVDDADFRNFQRSPEPESDYVEVDA
QKWQQRVASPSELRFAFLSAFGVDRTAKEPCEDVTRRHAPCGHVVDVAGDSRELRCPHCSEVEKREVLFDQDA
NACDNLLRGWLRKAPEMRQARTKRPPSIRRQRMIAGAKKKREAKAAEERRREARGG (SEQ ID NO: 257)
>3300012204|Ga0137374_10001132_4
[terrestrial-soil-vadose zone soil]
MATLVYRYGVRAHGSARQQDAVVSDPAMLEQLRLGHELRNALVGVQHRYEDGKRAVWSGFASVAAADHRVTTG
ETAVAELEKQARAEHSADRTAATRQGTAESLKAARAAVKQARADRKAAMAAVAEQAKPKIQALGDDRDAEIKD
LYRRFCQDGVLLPRCGRCAGDLRSDGDCTDCGAAHEPRKLYWATYNAIREDHQTAVKLVEAKRKAGQPARLRF
RRWTGDGTLTVQLQRMHGPACRCVTCAEKLTRRARKTDPQAPAVAADPAYPPTDPPRDPALLASGQGKWRNVL
QLGTWIPPGEWSAMSRAERRRVGRSHIGWQLGGGRQLTLPVQLHRQMPADADVAMAQLTRVRVGGRHRMSVAL
TAKLPDPPQVQGLPPVALHLGWRQRPDGSLRVATWACPQPLDLPPAVADVVVSHGGRWGEVIMPARWLADAEV
PPRLLGRRDKAMEPVLEALADWLEAHTEACTARMTPALVRRWRSQGRLAGLTNRWRGQPPTGSAEILTYLEAW
RIQDKLLWERESHLRRRLAARRDDAWRRVASWLARHAGVLVVDDADIAELRRRDDPADTDPTMPASAAQAARA
RAALAAPGRLRHLATITATRDGLGVHTVASAGLTRLHRKCGHQAQPDPRYAASAVVTCPGCGNGYDQDYNAAM
LMLDRQQQP (SEQ ID NO: 258)
>3300012210|Ga0137378_10000107_47
[terrestrial-soil-vadose zone soil]
MENNITVMRYGARVPITGLESVDRQLRLSKKYRNALCEIERRRRDGIARVQHGTRAGASPLDADELLAPLILK
IDELEASISEMRKQTKLTHAGGGNPAARASLRDQIAAVKADLAVLRWLRGWSKSRLRLSDDERAAIAMCDGEK
MSAWMIHRVKPWWALGVAVHATMNGSAALRLRCEYMIIDETAKYERRQARAVAGLSPGTYLLIEAAADKWRQN
PEQPRFMRYDGTGRVGVQVQGGCTVAELEGGQDTRMRLLPATEIDPPVAPTSSRQIARAIAYGVVHFCRAGNM
APRDTYRILQLRVETMGRAPVWASIPIVYHRPLPADGVIVAAWLQRKKIGVRSVYDAQLVVRAAMTPQSHRPT
TGTIAVDIGSRDIPSTGETRVAYSLDSSGAHAAMILPLFRLSSATSRGTGRRRIVPDDEKKIDDIKSIRSRHL
DEIRDQITAYKVSVGAAASSPHPVPAIEWLRAATDRITSWRSPARIVWLRRQWQHHTGDEKIFSSIEAYIRQD
RHLLDWQSREMRRRLGRRRELYRTAAMRLARTYDTIILAARDYRREEWVPEDAPSTRAHESRSIMRGAAPGEF
REIIRRSAKKYGTTLIEMPLEGDTAWALDYRVCQRMLASTEVVDVQAAPLASASRSNHYGTDESFHRRRLGTD
ERIDPLARIDVSG (SEQ ID NO: 259)
>3300012532|Ga0137373_10000316_4
[terrestrial-soil-vadose zone soil]
MATLVYRYGVRAHGSARQQDAVVSDPAMLEQLRLGHELRNALVGVQHRYEDGKRAVWSGFASVAAADHRVTTG
ETAVAELEKQARAEHSADRTAATRQGTAESLKAARAAVKQARADRKAAMAAVAEQAKPKIQALGDDRDAEIKD
LYRRFCQDGVLLPRCGRCAGDLRSDGDCTDCGAAHEPRKLYWATYNAIREDHQTAVKLVEAKRKAGQPARLRF
RRWTGDGTLTVQLQRMHGPACRCVTCAEKLTRRARKTDPQAPAVAADPAYPPTDPPRDPALLASGQGKWRNVL
QLGTWIPPGEWSAMSRAERRRVGRSHIGWQLGGGRQLTLPVQLHRQMPADADVAMAQLTRVRVGGRHRMSVAL
TAKLPDPPQVQGLPPVALHLGWRQRPDGSLRVATWACPQPLDLPPAVADVVVSHGGRWGEVIMPARWLADAEV
PPRLLGRRDKAMEPVLEALADWLEAHTEACTARMTPALVRRWRSQGRLAGLTNRWRGQPPTGSAEILTYLEAW
RIQDKLLWERESHLRRRLAARRDDAWRRVASWLARHAGVLVVDDADIAELRRRDDPADTDPTMPASAAQAARA
RAALAAPGRLRHLATITATRDGLGVHTVASAGLTRLHRKCGHQAQPDPRYAASAVVTCPGCGNGYDQDYNAAM
LMLDRQQQP (SEQ ID NO: 258)
>3300012532|Ga0137373_10000407_43
[terrestrial-soil-vadose zone soil]
MIVYRYGALKPTEGFDLLLTQLRLACRYRNALVELLNWRIIAEQSGVERSAAKLVHAEMSCWLRSRCGLGWGT
YQAIEADVRRAAKSPYRAPRKVSGRARWFAQVRQIKIQRPPDADGNQDAQVREIGLDPTKFRARFRRFDGTGR
LGANIQACSGATTDDVLSGRGSLRLSAPEGRVTARLYLGLGIHVTLPVIAHRPLPPGVQVVRALICVERVGDR
YVYSVHVTMRHERPERQYGSGRAAINFGWRSLGDRGVRIAYVATDEGSTDELILPRRLIDKLRHSESLRGLAD
DAAVAYLGDARGRTRARREALRDPSATHRELGRVPIEGEPISAEHWARRDRHLYQWERDEYAKVLRQRREIYR
LWVRSLAAKYGSVVMEDYDLPTLISRDQPTEIPEARHVRFLVAPGSLRAEVQSVFGERATLATIKRRTMVCSV
CGCELTGDRVRDVVLYCEQCDAQRDQDANNAANQLIDTAAE (SEQ ID NO: 260)
>3300012930|Ga0137407_10020190_4
[terrestrial-soil-vadose zone soil]
MSTIVYRFGVHGAPLDNLELVKQQMRAAHNYANDLVAIERGRRTALHAIDDVPDVRNTIETVRQSTKSTRKAA
ITALRLARKAARAAAEEELARVQALDESIRRDARAITVCYWGSYLTIEMSAQQQRSQPLYEDDAITPNLPRFR
GWREEGQIGIQIQKGLPTSAVRACTDTRARLDRSDRKKQGSKGRSVEYADLWIRIGSDGRAPIWTRVRVIMHR
QIPDAAQWKWVRLSYRREGRTFAWSVEISVDVDRPKRTLDTTLRGAIAIEPQWSENADGSIVCATYRTEDGSS
GEIELSPRIVGALRKADSIRAVRDMILNEARKDIHRALVEAGPALPVWLKDARNTMHLWKSQERFYRLANHWR
RERCDAAREAYDRLQEWELRDDHLWRYEAGSRGQAIRSRNDFYHVIASQFARKHRFVIVPKRDYSREARFGAE
SDLRFIVSPSSLVSALDCSFDHGESAYVCPWVRPDGDGDSAEWPAIAIERFCAGDSAMIARKIRKENDSEEKQ
ESAWARRKRLKREKEMRLATARITDGNGTKSLGQ (SEQ ID NO: 261)
>3300005987|1071089|scaffold14955_2
[wastewater-nutrient removal-wastewater effluent]
MSTLVYRFGLLPPHENDALVRSQMRLAHRYRNDLVQIERARRAAVRDVARAAPEVARLELEAARTDAACAKVG
GQIKAARAAGRTRKDSVELIEQLKALRIEHKEVVLALREARKTARVAAEPVLAEIEERVAAMRRGARAICGVY
WGTYLMIEDADQAMRKMPLYDKDAEPSDPRFVPWTGDGSVGVQIQGGMTGEDTADDTRLRIESAAPPPGADPN
SKRSLRRRYCVLAMRVGSEGRDPVWARWRMVMERPLPADARIKRAAVKLRRVGPREEWSVTITLETAERDRRV
SDQVGMVGIDLGWRLMPDGLRVAAWHGSDGASGFLTLPDTRPTFHTTPGGRTRSSALGVVDAARKVEDLSSKR
DKAFNEARSAIARIEGAPPWFELATKTISQWKSQGRLAALVRRWRDARWDGDAEAYEEAEKWRYHDHHLWAWE
TSQQAKALRARREVFRLFAADMAKRYARLAIEGLDLRAFARKTDDDTNETARRNRVVVAPSKLREALLLAFGS
AINHWAETPKGDRVVVVEAAGTTMVHHECGSVERWDQATHVSHLCSSCGEIFDQDANAAKNILAAGERLGGPV
LSGAARNDENVSNLSQVREGRWAKAKRMKAEKDARLEAARKAAPSAAE (SEQ ID NO: 262)
>3300005988|1071091|scaffold06014_8
[wastewater-nutrient removal-wastewater effluent]
MSTLVYRFGLLPPHENDALVRSQMRLAHRYRNDLVQIERARRAAVRDVARAAPEVARLELEAARTDAACAKVG
GQIKAARAAGRTRKDSVELIEQLKALRIEHKEVVLALREARKTARVAAEPVLAEIEERVAAMRRGARAICGVY
WGTYLMIEDADQAMRKMPLYDKDAEPSDPRFVPWTGDGSVGVQIQGGMTGEDTADDTRLRIESAAPPPGADPN
SKRSLRRRYCVLAMRVGSEGRDPVWARWRMVMERPLPADARIKRAAVKLRRVGPREEWSVTITLETAERDRRV
SDQVGMVGIDLGWRLMPDGLRVAAWHGSDGASGFLTLPDTRPTFHTTPGGRTRSSALGVVDAARKVEDLSSKR
DKAFNEARSAIARIEGAPPWFELATKTISQWKSQGRLAALVRRWRDARWDGDAEAYEEAEKWRYHDHHLWAWE
TSQQAKALRARREVFRLFAADMAKRYARLAIEGLDLRAFARKTDDDTNETARRNRVVVAPSKLREALLLAFGS
AINHWAETPKGDRVVVVEAAGTTMVHHECGSVERWDQATHVSHLCSSCGEIFDQDANAAKNILAAGERLGGPV
LSGAARNDENVSNLSQVREGRWAKAKRMKAEKDARLEAARKAAPSAAE (SEQ ID NO: 262)
>3300006056|1071094|scaffold118627_2
[wastewater-nutrient removal-wastewater effluent]
MSTLVYRFGLLPPHENDALVRSQMRLAHRYRNDLVQIERARRAAVRDVARAAPEVARLELEAARTDAACAKVG
GQIKAARAAGRTRKDSVELIEQLKALRIEHKEVVLALREARKTARVAAEPVLAEIEERVAAMRRGARAICGVY
WGTYLMIEDADQAMRKMPLYDKDAEPSDPRFVPWTGDGSVGVQIQGGMTGEDTADDTRLRIESAAPPPGADPN
SKRSLRRRYCVLAMRVGSEGRDPVWARWRMVMERPLPADARIKRAAVKLRRVGPREEWSVTITLETAERDRRV
SDQVGMVGIDLGWRLMPDGLRVAAWHGSDGASGFLTLPDTRPTFHTTPGGRTRSSALGVVDAARKVEDLSSKR
DKAFNEARSAIARIEGAPPWFELATKTISQWKSQGRLAALVRRWRDARWDGDAEAYEEAEKWRYHDHHLWAWE
TSQQAKALRARREVFRLFAADMAKRYARLAIEGLDLRAFARKTDDDTNETARRNRVVVAPSKLREALLLAFGS
AINHWAETPKGDRVVVVEAAGTTMVHHECGSVERWDQATHVSHLCSSCGEIFDQDANAAKNILAAGERLGGPV
LSGAARNDENVSNLSQVREGRWAKAKRMKAEKDARLEAARKAAPSAAE (SEQ ID NO: 262)
*Effector proteins having identical amino acid sequences were identified from different sources and assigned the same sequence identifier.

TABLE 3
Nucleotide Sequences of Representative CLUST.018837 Direct Repeats

| Effector Accession | Direct Repeat Nucleotide Sequence |
|---|---|
| WP_081130164.1 (SEQ ID NO: 1) | GTTTCATCGGCCATCGCGGCGGCCTCGTAGCTGCGAC (SEQ |
| | ID NO: 27) |
| WP_018079340.1 (SEQ ID NO: 2) | GTTTCATCAGCCATTGCAGGGGCTTTG (SEQ ID NO: 28) |
| WP_064217851.1 (SEQ ID NO: 3) | GTGTTATGCCCATCTCAGCGGGCTGGTTGCTGAGAC (SEQ ID |
| | NO: 29) |
| JMEB01000165_11 (SEQ ID NO: 4) | GTTATAGTGGCCATTGTAGGGGCTT (SEQ ID NO: 30) |
| WP_051690567.1 (SEQ ID NO: 5) | GTTATAGTGGCCATTGTAGGGGCTT (SEQ ID NO: 30) |
| OJW42488.1 (SEQ ID NO: 6) | GGTTTAAGGCGATCACGGCCGCCTAGTTGCCGCGAC (SEQ ID |
| | NO: 31) |
| LNFM01018448_6 (SEQ ID NO: 7) | GGTGCTCAAGCCATCGCAGCGGCATCGTTGCTGCGAC (SEQ |
| | ID NO: 32) |
| 3300004774\|Ga0007794_10001723_8 | GAGCGGTTAACAGGGTGTCGATATAGATT (SEQ ID NO: |
| (SEQ ID NO: 8) | 33) |
| 3300004776\|Ga0007800_10001775_2 | GAGCGGTTAACAGGGTGTCGATATAGATT (SEQ ID NO: |
| (SEQ ID NO: 8) | 33) |
| 3300009004\|Ga0100377_1000348_44 | GTAACAACAGCCATTACCCTGGCTTAGTAAGGGTGAC (SEQ |
| (SEQ ID NO: 9) | ID NO: 34) |
| 3300004236\|Ga0066449_1000007_83 | AGTAGAACCCTGTCGCTTGGGCGGTAAAGCGAAC (SEQ ID |
| (SEQ ID NO: 10) | NO: 35) |
| 3300009432\|Ga0115005_10004282_5 | GATTAAGGCCCCTGTGCATTGGGGTGTAAATGCAAC (SEQ ID |
| (SEQ ID NO: 11) | NO: 36) |
| 3300009436\|Ga0115008_10017733_3 | GTCTAAGGCCCCTGTGCATTGGGGTGTAAATGCAAC (SEQ ID |
| (SEQ ID NO: 12) | NO: 37) |
| 3300009436\|Ga0115008_10017733_4 | GTCTAAGGCCCCTGTGCATTGGGGTGTAAATGCAAC (SEQ ID |
| (SEQ ID NO: 13) | NO: 37) |
| 3300001351\|JGI20153J14318_10007490_6 | CTTTAAGGACCCTGTACGTTGGGGTGTAAACGTAAC (SEQ ID |
| (SEQ ID NO: 14) | NO: 38) |
| 3300009447\|Ga0115560_1022222_2 | CTTTAAGGACCCTGTACGTTGGGGTGTAAACGTAAC (SEQ ID |
| (SEQ ID NO: 15) | NO: 38) |
| 3300009505\|Ga0115564_10016546_3 | CTTTAAGGACCCTGTACGTTGGGGTGTAAACGTAAC (SEQ ID |
| (SEQ ID NO: 16) | NO: 38) |
| 3300020165\|Ga0206125_10004811_3 | CTTTAAGGACCCTGTACGTTGGGGTGTAAACGTAAC (SEQ ID |
| (SEQ ID NO: 17) | NO: 38) |
| 3300010313\|Ga0116211_1004493_2 | GGTATCATGACCCTACGGGTGGGGGG (SEQ ID NO: 39) |
| (SEQ ID NO: 18) | |
| 3300009784\|Ga0123357_10002363_9 | AGCCATCGCAGGGGCTTGGTGCTTGCGAC (SEQ ID NO: |
| (SEQ ID NO: 19) | 40) |
| ADIG01000806_20 (SEQ ID NO: 20) | ATTCCAAGGCGATCACAGCCGCCTAGTAGTTGTGAC (SEQ ID |
| | NO: 41) |
| CXWL01128655_18 (SEQ ID NO: 21) | GTTTTAGAACCCTGTTGAGTGGGCATAAACTCAAACT (SEQ |
| | ID NO: 42) |
| OGCL01001770_13 (SEQ ID NO: 18) | GGTATCATGACCCTACGGATGGGGGG (SEQ ID NO: 43) |
| LNAP01002847_16 (SEQ ID NO: 22) | GATTCATAGCCCTGTCGGTTGGGCGGTAAACCGAAC (SEQ ID |
| | NO: 44) |
| 3300007533\|Ga0102944_1000048_72 | GTCTCAATAGCGATCGGCGCCGCTTAGTAGGGTCGAC (SEQ |
| (SEQ ID NO: 23) | ID NO: 45) |
| 3300007533\|Ga0102944_1003721_10 | GGTAACAATAGCGATCGGCGCCGCTTGGTAGTGTCGAC (SEQ |
| (SEQ ID NO: 24) | ID NO: 46) |
| 3300007533\|Ga0102944_1003721_8 | GGTAACAATAGCGATCGGCGCCGCTTGGTAGTGTCGAC (SEQ |
| (SEQ ID NO: 25) | ID NO: 46) |
| APMI01033782_24 (SEQ ID NO: 26) | ATCTCAATGGCCATCGTCGGGGCTTTGTACCGGCGAC (SEQ |
| | ID NO: 47) |
| NZ_JQKL01000024_23 (SEQ ID NO: 48) | GTTGCAATGCCTAGCTCAGAGGTTTAAAGACTGAGAC (SEQ |
| | ID NO: 263) |
| WP_081908191.1 (SEQ ID NO: 49) | GTTGCAATGCCTAGCTCAGAGGTTTAAAGACTGAGAC (SEQ |
| | ID NO: 263) |
| GAB36148.1 (SEQ ID NO: 50) | GTGTCAACGCCAGCGCGGAGGCGTCAAATCCGCGAC (SEQ ID |
| | NO: 264) |
| BAFB01000202_4 (SEQ ID NO: 51) | GTGTCAACGCCAGCGCGGAGGCGTCAAATCCGCGAC (SEQ ID |
| | NO: 264) |
| WP_039994403.1 (SEQ ID NO: 52) | GTGTCAACGCCAGCGCGGAGGCGTCAAATCCGCGAC (SEQ ID |
| | NO: 264) |
| WP_013159911.1 (SEQ ID NO: 53) | GTAGCAATGCCTAGCTCAGGGGCTT (SEQ ID NO: 265) |
| WP_096876841.1 (SEQ ID NO: 54) | GTTACAAACCCTGCTCATTGGGTTGGTTAATGAGAC (SEQ ID |
| | NO: 266) |
| WP_048895525.1 (SEQ ID NO: 55) | GTGAGAATGACCAGCGCACCGGTCGAAAGGTGCGAC (SEQ ID |
| | NO: 267) |
| WP_061006603.1 (SEQ ID NO: 56) | GTGTCATAGCCCAGCTTGGCGGGCGAAGGCCAAGAC (SEQ ID |
| | NO: 268) |
| WP_011733919.1 (SEQ ID NO: 57) | GTTGACATGCGTGCTCCGCCGCTTTGTAGTGGAGAC (SEQ ID |
| | NO: 269) |
| WP_018234394.1 (SEQ ID NO: 58) | TTGATAATGCCCGCTCTGCGGCCTCGTAGTAGAGAC (SEQ ID |
| | NO: 270) |
| 3300000944\|BBAY81_10000005_89 | CAACGCCTACAGTGGGCTTCGTACATTGTGAC (SEQ ID NO: |
| (SEQ ID NO: 59) | 271) |
| LSQX01035253_23 (SEQ ID NO: 60) | CAGCGGCCCACGCACGCGAGGGACGGTC (SEQ ID NO: |
| | 272) |
| 3300013131\|Ga0172373_10056063_2 | CAAGCAAGCCTTGCCGAAGAGGCTCGATCTTCGGACG (SEQ |
| (SEQ ID NO: 61) | ID NO: 273) |
| 3300013136\|Ga0172370_10027535_4 | ATGATAAGAGTTTCTCGATACTCTATAAATCGAGAC (SEQ ID |
| (SEQ ID NO: 62) | NO: 274) |
| 3300013137\|Ga0172375_10012175_6 | CAAGCAAGCCTTGCCGAAGAGGCTCGATCTTCGGAC (SEQ ID |
| (SEQ ID NO: 63) | NO: 275) |
| 3300010293\|Ga0116204_1010874_1 | GGTTGAAGCGCCCGCGCAAGGGCTTTGTACTTGCGAC (SEQ |
| (SEQ ID NO: 64) | ID NO: 276) |
| 3300010293\|Ga0116204_1010874_2 | GGTTGAAGCGCCCGCGCAAGGGCTTTGTACTTGCGAC (SEQ |
| (SEQ ID NO: 65) | ID NO: 276) |
| 3300008255\|Ga0100403_1011992_3 | GTCGCAATGCCAGCCGAACGGCTTGGAAGTTCGGAC (SEQ ID |
| (SEQ ID NO: 66) | NO: 277) |
| 3300014155\|Ga0181524_10003409_23 | GTGGCTACGGCATCGCGGCGCCTCGGAGATCGCGAC (SEQ ID |
| (SEQ ID NO: 67) | NO: 278) |
| 3300014156\|Ga0181518_10000096_28 | GTGGCTACGGCATCGCGGCGCCTCGGAGATCGCGAC (SEQ ID |
| (SEQ ID NO: 67) | NO: 278) |
| 3300014158\|Ga0181521_10000063_92 | GTGGCTACGGCATCGCGGCGCCTCGGAGATCGCGAC (SEQ ID |
| (SEQ ID NO: 67) | NO: 278) |
| 3300014159\|Ga0181530_10000119_98 | GTGGCTACGGCATCGCGGCGCCTCGGAGATCGCGAC (SEQ ID |
| (SEQ ID NO: 67) | NO: 278) |
| 3300014201\|Ga0181537_10003972_13 | GTCGCAGAGGAAGCTCGACGGATCGAGCGTCGAGAG (SEQ ID |
| (SEQ ID NO: 68) | NO: 279) |
| 3300014201\|Ga0181537_10021284_1 | GTCGCGATCGAAGCTCCATCGGCTGGCGATGGAGAC (SEQ ID |
| (SEQ ID NO: 69) | NO: 280) |
| 3300014201\|Ga0181537_10040512_3 | CCAGAAAGGGCAGCGCATCGCCCAGGAGAATGCGAC (SEQ ID |
| (SEQ ID NO: 70) | NO: 281) |
| 3300014654\|Ga0181525_10000532_4 | GTAGCAACGCCAGCTCGGTTGGTTCTGAGCCGAGACA (SEQ |
| (SEQ ID NO: 71) | ID NO: 282) |
| 3300014657\|Ga0181522_10000394_52 | GTGGAAACGTCAATGTCCGGCGGACGACGCTGGAAC (SEQ ID |
| (SEQ ID NO: 72) | NO: 283) |
| 3300014657\|Ga0181522_10000394_53 | GTGGAAACGTCAATGTCCGGCGGACGACGCTGGAAC (SEQ ID |
| (SEQ ID NO: 73) | NO: 283) |
| 3300009175\|Ga0073936_10014029_2 | CGCTGCAGGGCCTCAAACGACTAGACGAGGCACTGGCAAGCTAC |
| (SEQ ID NO: 74) | GACAAGG (SEQ ID NO: 284) |
| 3300015360\|Ga0163144_10020017_5 | CCAACAACGGCTGCTGAGCGCCTT (SEQ ID NO: 285) |
| (SEQ ID NO: 75) | |
| 3300015360\|Ga0163144_10020017_4 | CCAACAACGGCTGCTGAGCGCCTT (SEQ ID NO: 285) |
| (SEQ ID NO: 76) | |
| 3300015360\|Ga0163144_10033243_8 | GGCTGCTGAGCGCCTTACAAGCTCAGAC (SEQ ID NO: |
| (SEQ ID NO: 77) | 286) |
| 3300015360\|Ga0163144_10033243_7 | GGCTGCTGAGCGCCTTACAAGCTCAGAC (SEQ ID NO: |
| (SEQ ID NO: 78) | 286) |
| 3300015360\|Ga0163144_10062707_6 | GTAACAACCCCTAGCGCAAGAGGGAAAGCTTGCGAC (SEQ ID |
| (SEQ ID NO: 79) | NO: 287) |
| 3300015360\|Ga0163144_10062707_6 | GTAACAACCCCTAGCGCAAGAGGGAAAGCTTGCGAC (SEQ ID |
| (SEQ ID NO: 80) | NO: 287) |
| 3300020057\|Ga0163151_10006104_16 | CCAACAGCGGCTGCTGAACGCCTTACAAGTTCAGAC (SEQ ID |
| (SEQ ID NO: 75) | NO: 288) |
| 3300020186\|Ga0163153_10017638_7 | CTCACAGTGCCTGCGCAGCGGCTTCGTAGCTGCGAC (SEQ ID |
| (SEQ ID NO: 81) | NO: 289) |
| 3300020195\|Ga0163150_10003396_14 | CTCACAGTGCCTGCGCAGCGGCTTCGTAGCTGCGAC (SEQ ID |
| (SEQ ID NO: 82) | NO: 289) |
| 3300020203\|Ga0163148_10001247_2 | GTAACAACCCCTAGCGCAAGAGGGAAAGCTTGCGAC (SEQ ID |
| (SEQ ID NO: 83) | NO: 287) |
| 3300020203\|Ga0163148_10001247_2 | GTAACAACCCCTAGCGCAAGAGGGAAAGCTTGCGAC (SEQ ID |
| (SEQ ID NO: 84) | NO: 287) |
| 3300020213\|Ga0163152_10009495_14 | GTAACAACCCCTAGCGCAAGAGGGAAAGCTTGCGAC (SEQ ID |
| (SEQ ID NO: 85) | NO: 287) |
| 3300020213\|Ga0163152_10009495_14 | GTAACAACCCCTAGCGCAAGAGGGAAAGCTTGCGAC (SEQ ID |
| (SEQ ID NO: 86) | NO: 287) |
| 3300020219\|Ga0163146_10006198_18 | CCAACAGCGGCTGCTGAACGCCTTACAAGTTCAGAC (SEQ ID |
| (SEQ ID NO: 75) | NO: 288) |
| 3300020596\|Ga0163149_10010333_13 | CCAACAACGGCTGCTGAACGCCTTACAAGTTCAGAC (SEQ ID |
| (SEQ ID NO: 87) | NO: 290) |
| 3300020596\|Ga0163149_10010333_12 | CCAACAACGGCTGCTGAACGCCTTACAAGTTCAGAC (SEQ ID |
| (SEQ ID NO: 88) | NO: 290) |
| 3300004174\|Ga0066406_1000030_21 | GTTGCAATGCCTGCTCATAGGCTTGGTTTATGAGAC (SEQ ID |
| (SEQ ID NO: 89) | NO: 291) |
| 3300004200\|Ga0066422_1000628_7 | GTTGCAATGCCTGCTCATAGGCTTGGTTTATGAGAC (SEQ ID |
| (SEQ ID NO: 89) | NO: 291) |
| 3300004205\|Ga0066415_1000057_23 | GTTGCAATGCCTGCTCATAGGCTTGGTTTATGAGAC (SEQ ID |
| (SEQ ID NO: 89) | NO: 291) |
| 3300004565\|Ga0066503_104695_4 | GTTGCAATGCCTGCTCATAGGCTTGGTTTATGAGAC (SEQ ID |
| (SEQ ID NO: 89) | NO: 291) |
| 3300009686\|Ga0123338_10029047_2 | GTAGCAATACCCTAGCTCGAGGGGGGTTTGTCGAGAC (SEQ |
| (SEQ ID NO: 90) | ID NO: 292) |
| 3300001242\|C687J13896_1000006_134 | GTTTCAGTATCCTGCTCAGAGGAGTCGTTTCTGAGAC (SEQ |
| (SEQ ID NO: 91) | ID NO: 293) |
| 3300005236\|Ga0066636_10020712_3 | GTCGCAATGCCAGCCGAACGGCTTGGAAGTTCGGAC (SEQ ID |
| (SEQ ID NO: 92) | NO: 277) |
| 3300014208\|Ga0172379_10007070_15 | GCGACGACAACGGCAGCTCATCGCCACGAAAGATGAGAC (SEQ |
| (SEQ ID NO: 93) | ID NO: 294) |
| 3300014208\|Ga0172379_10014650_2 | GTGCAGGGCTGTCGAACCTGCGA (SEQ ID NO: 295) |
| (SEQ ID NO: 94) | |
| 3300014613\|Ga0180008_1000021_8 | GCTGGGATGTTTAGTGATC (SEQ ID NO: 296) |
| (SEQ ID NO: 95) | |
| 3300014613\|Ga0180008_1000021_9 | GCTGGGATGTTTAGTGATC (SEQ ID NO: 296) |
| (SEQ ID NO: 96) | |
| 3300014656\|Ga0180007_10000195_44 | GCTGGGAGGTTTAGTGATCCCAGAC (SEQ ID NO: 297) |
| (SEQ ID NO: 95) | |
| 3300014656\|Ga0180007_10000195_48 | GCTGGGAGGTTTAGTGATCCCAGAC (SEQ ID NO: 297) |
| (SEQ ID NO: 96) | |
| 3300014656\|Ga0180007_10004731_7 | GTCACAATGCCTGCGCAGAGGCTTTGTTTCTGCGACG (SEQ |
| (SEQ ID NO: 97) | ID NO: 298) |
| 3300014656\|Ga0180007_10004731_5 | GTCACAATGCCTGCGCAGAGGCTTTGTTTCTGCGACG (SEQ |
| (SEQ ID NO: 98) | ID NO: 298) |
| 3300015370\|Ga0180009_10002661_7 | GTATCAATGCCTGCTCAAGGGCTTTGTGCTTGAGAC (SEQ ID |
| (SEQ ID NO: 99) | NO: 299) |
| 3300009760\|Ga0116131_1003961_2 | CTCGCAATGCCAGCCCAGAGGCGGATGTTCTGGGAC (SEQ ID |
| (SEQ ID NO: 100) | NO: 300) |
| 3300018019\|Ga0187874_10017489_1 | CTTTCAAGACGAGCGGAAGCGTCTGCTTCTTCCGAC (SEQ ID |
| (SEQ ID NO: 101) | NO: 301) |
| 3300018025\|Ga0187885_10005575_2 | ATCGAAGAGCCTGCTCAGGGGCTTTGTTCTTGAGAC (SEQ ID |
| (SEQ ID NO: 102) | NO: 302) |
| 3300018025\|Ga0187885_10005575_1 | ATCGAAGAGCCTGCTCAGGGGCTTTGTTCTTGAGAC (SEQ ID |
| (SEQ ID NO: 103) | NO: 302) |
| 3300018057\|Ga0187858_10035455_2 | CTTTCAAGACGAGCGGAAGCGTCTGCTTCTTCCG (SEQ ID |
| (SEQ ID NO: 104) | NO: 303) |
| 3300012183\|Ga0136624_1011435_1 | TAAGTGTCAGTGCCTGCGCACCGG (SEQ ID NO: 304) |
| (SEQ ID NO: 105) | |
| 3300012682\|Ga0136611_10000100_4 | CAAACAATGCCCGCGCAGTGGGCTTCGTCACTGCGAC (SEQ |
| (SEQ ID NO: 106) | ID NO: 305) |
| 3300013127\|Ga0172365_10004082_5 | GTAGTAACGCCCGCGAACAGGCTTCGTTTGTTCGAC (SEQ ID |
| (SEQ ID NO: 107) | NO: 306) |
| 3300013127\|Ga0172365_10004082_3 | GTAGTAACGCCCGCGAACAGGCTTCGTTTGTTCGAC (SEQ ID |
| (SEQ ID NO: 108) | NO: 306) |
| 3300013127\|Ga0172365_10033732_1 | CGTTGCAAGGGCTGCGCGACACCCTGGAAGTCGCGAC (SEQ |
| (SEQ ID NO: 109) | ID NO: 307) |
| 3300013128\|Ga0172366_10016188_4 | GTAGTAACGCCCGCGAACAGGCTTCGTTTGTTCGAC (SEQ ID |
| (SEQ ID NO: 107) | NO: 306) |
| 3300013128\|Ga0172366_10018111_5 | GTCGCAATGGGGCGCTCACCCCCCTTGTAAGTGAGAC (SEQ |
| (SEQ ID NO: 110) | ID NO: 308) |
| 3300013129\|Ga0172364_10001281_26 | GTGGCAAAGGCATCGAATCGCCTGAGAAGATTCGAC (SEQ ID |
| (SEQ ID NO: 111) | NO: 309) |
| 3300013129\|Ga0172364_10017363_4 | AACGCCTGCGAACAGGCTTCGTTTGTTCGAC (SEQ ID NO: |
| (SEQ ID NO: 107) | 310) |
| 3300013129\|Ga0172364_10018773_2 | GTCGCAATGGGGCGCTCACCCCCTTTGTAAGTGAGAC (SEQ |
| (SEQ ID NO: 112) | ID NO: 311) |
| 3300013129\|Ga0172364_10045136_2 | GTTGCAAGGGCTGCGCGACACCCTGGAAGTCGCGAC (SEQ ID |
| (SEQ ID NO: 113) | NO: 312) |
| 3300013130\|Ga0172363_10000480_22 | GTGGCAAAGGCATCGAATCGCCTGAGAAGATTCGAC (SEQ ID |
| (SEQ ID NO: 111) | NO: 309) |
| 3300013130\|Ga0172363_10009486_8 | AACGCCTGCGAACAGGCTTCGTTTGTTCGAC (SEQ ID NO: |
| (SEQ ID NO: 114) | 310) |
| 3300013130\|Ga0172363_10014785_2 | GGGTGGCAGTGCCTGCTCAGAGGCTTAGTATCTGTGACA (SEQ |
| (SEQ ID NO: 115) | ID NO: 313) |
| 3300013133\|Ga0172362_10012573_3 | AACGCCTGCGAACAGGCTTCGTTTGTTCGAC (SEQ ID NO: |
| (SEQ ID NO: 107) | 310) |
| 3300013133\|Ga0172362_10022806_8 | TGTGGCAGTGCCTGCTCAGAGGCTTAGTATCTGTGACA (SEQ |
| (SEQ ID NO: 115) | ID NO: 314) |
| 3300013133\|Ga0172362_10025871_2 | GTTGCAAGGGTTGCGCGACACCCTGGAAGTCGCGAC (SEQ ID |
| (SEQ ID NO: 113) | NO: 315) |
| 3300010155\|Ga0098047_10009758_2 | GTGCAAATGCCCGCACAGAGGCTTAGTGTCTGTGAC (SEQ ID |
| (SEQ ID NO: 116) | NO: 316) |
| 3300006805\|Ga0075464_10026824_2 | GTCACAACGCCCGCGCAGGGGCTTGGTATCTGCGAC (SEQ ID |
| (SEQ ID NO: 117) | NO: 317) |
| 3300006805\|Ga0075464_10026824_2 | GTCACAACGCCCGCGCAGGGGCTTGGTATCTGCGAC (SEQ ID |
| (SEQ ID NO: 118) | NO: 317) |
| 3300009149\|Ga0114918_10020022_2 | CTTTCAAAGCTTGCTCGTTAGCTTTATGAACGAGAC (SEQ ID |
| (SEQ ID NO: 119) | NO: 318) |
| 3300006083\|Ga0081762_1007854_6 | GTTTGAAAGCAGCTATAGAGGGCAGAAAC (SEQ ID NO: |
| (SEQ ID NO: 120) | 319) |
| 3300010354\|Ga0129333_10000304_8 | GCAAGGGCTGCTCAGGGCCCTGGAATCTGAGAC (SEQ ID |
| (SEQ ID NO: 121) | NO: 320) |
| 3300010354\|Ga0129333_10000304_10 | GCAAGGGCTGCTCAGGGCCCTGGAATCTGAGAC (SEQ ID |
| (SEQ ID NO: 122) | NO: 320) |
| 3300009507\|Ga0115572_10029017_2 | ATTTAATGACCCTGCGTGTTGGGGTGTGAACACGAC (SEQ ID |
| (SEQ ID NO: 123) | NO: 321) |
| 3300017963\|Ga0180437_10000100_151 | CTTACAATACCTGCGAGACGGTTTAGAAGTCTCGAC (SEQ ID |
| (SEQ ID NO: 124) | NO: 322) |
| 3300017963\|Ga0180437_10000153_25 | CCTTCAATCCCTGCGAGACGGGTTAGAAGTCTCGAC (SEQ ID |
| (SEQ ID NO: 125) | NO: 323) |
| 3300017963\|Ga0180437_10000488_78 | GTAACAACACCAGTCCAAAGGTTTATGATTTGGAAC (SEQ ID |
| (SEQ ID NO: 126) | NO: 324) |
| 3300017963\|Ga0180437_10000692_13 | CTCGCGGTCCCATCGGAACGGGTTGTGGTTCCGACA (SEQ ID |
| (SEQ ID NO: 127) | NO: 325) |
| 3300017963\|Ga0180437_10006965_20 | GTCTCAACGCCTACTCAGGGGCTTTGT (SEQ ID NO: 326) |
| (SEQ ID NO: 128) | |
| 3300017963\|Ga0180437_10006965_20 | GTCTCAACGCCTACTCAGGGGCTTTGT (SEQ ID NO: 326) |
| (SEQ ID NO: 129) | |
| 3300017963\|Ga0180437_10073069_2 | CTTGCAACGGCAGCGTACCGCCTTCAAGTGTGCGAC (SEQ ID |
| (SEQ ID NO: 130) | NO: 327) |
| 3300017971\|Ga0180438_10000090_91 | CCTTCAATCCCTGCGAGACGGGTTAGAAGTCTCGAC (SEQ ID |
| (SEQ ID NO: 125) | NO: 323) |
| 3300017971\|Ga0180438_10000124_114 | CTCGCGGTCCCATCGGAACGGGTTGTGGTTCCGACA (SEQ ID |
| (SEQ ID NO: 127) | NO: 325) |
| 3300017971\|Ga0180438_10000195_144 | CTTACAATACCTGCGAGACGGTTTAGAAGTCTCGAC (SEQ ID |
| (SEQ ID NO: 124) | NO: 322) |
| 3300017971\|Ga0180438_10013386_7 | GTAACAACACCAGTCCAAAGGTTTATGATTTGGAAC (SEQ ID |
| (SEQ ID NO: 126) | NO: 324) |
| 3300017971\|Ga0180438_10021273_1 | GTCTCAACGCCTACTCAGGGGCTTTGT (SEQ ID NO: 326) |
| (SEQ ID NO: 131) | |
| 3300017971\|Ga0180438_10044179_5 | CCTTGCAACGGCAGCGTACCGCCTTCAAGTGTGCGAC (SEQ |
| (SEQ ID NO: 132) | ID NO: 328) |
| 3300017971\|Ga0180438_10056790_2 | CCGGGAACAGCCGCGCAGGGGCTTGGTGCCTGCGAC (SEQ ID |
| (SEQ ID NO: 133) | NO: 329) |
| 3300017971\|Ga0180438_10072596_2 | CGTCGCAACGCCTGCGGAGAGGCCTTGTTTCTCCGACGG (SEQ |
| (SEQ ID NO: 134) | ID NO: 330) |
| 3300017987\|Ga0180431_10022214_3 | GTTTCAGACCCATCGCAAGGGGTTATAGCTTGCGAC (SEQ ID |
| (SEQ ID NO: 135) | NO: 331) |
| 3300017987\|Ga0180431_10041976_5 | GTCGCAACGCCTGCGGAGAGGCCTTGTTTCTCCGAC (SEQ ID |
| (SEQ ID NO: 136) | NO: 332) |
| 3300017989\|Ga0180432_10002388_5 | GTTTCAGACCCATCGCAAGGGGTTATAGCTTGCGAC (SEQ ID |
| (SEQ ID NO: 135) | NO: 331) |
| 3300017989\|Ga0180432_10021155_3 | GTTGCAAAGCCATCTCCAGGGTTTGGTGCTGGAGAC (SEQ ID |
| (SEQ ID NO: 137) | NO: 333) |
| 3300017989\|Ga0180432_10021155_5 | GTTGCAAAGCCATCTCCAGGGTTTGGTGCTGGAGAC (SEQ ID |
| (SEQ ID NO: 138) | NO: 333) |
| 3300017989\|Ga0180432_10043261_1 | GTTGGAATGCCTGTGGAAAGGCTTTGTATTTCCAAC (SEQ ID |
| (SEQ ID NO: 139) | NO: 334) |
| 3300017989\|Ga0180432_10045094_6 | AGCAATGCGAGCGCAGACGCTTCGTATCTGCGAC (SEQ ID |
| (SEQ ID NO: 140) | NO: 335) |
| 3300017991\|Ga0180434_10002646_1 | GTTTCAGACCCATCGCAAGGGGTTATAGCTTGCGAC (SEQ ID |
| (SEQ ID NO: 135) | NO: 331) |
| 3300017991\|Ga0180434_10013735_9 | GTCACAACGCCTGCGCAAGGGCTTTGTTATTGCGAC (SEQ ID |
| (SEQ ID NO: 141) | NO: 336) |
| 3300017992\|Ga0180435_10018121_11 | CTTCCAATACCTGCGAGACGGTTTAGAAGTCTCGACG (SEQ |
| (SEQ ID NO: 142) | ID NO: 337) |
| 3300018065\|Ga0180430_10011859_2 | GGAGCAATGCCTGCACGAGGGCTTTGTGCTCGTGAC (SEQ ID |
| (SEQ ID NO: 143) | NO: 338) |
| 3300018065\|Ga0180430_10038979_3 | GTCGCAACGCCTGCGCGGAGGCTTTGTTTCCGCGAC (SEQ ID |
| (SEQ ID NO: 144) | NO: 339) |
| 3300018080\|Ga0180433_10006034_17 | ATGGAAATGCCATTACAAAGGTTTAGGATTTGTAAC (SEQ ID |
| (SEQ ID NO: 145) | NO: 340) |
| 3300018080\|Ga0180433_10006034_18 | ATGGAAATGCCATTACAAAGGTTTAGGATTTGTAAC (SEQ ID |
| (SEQ ID NO: 146) | NO: 340) |
| 3300018080\|Ga0180433_10012134_6 | TGTCGCAAAGCCATCTCCAAGGCTTGGTG (SEQ ID NO: |
| (SEQ ID NO: 147) | 341) |
| 3300018080\|Ga0180433_10012134_6 | TGTCGCAAAGCCATCTCCAAGGCTTGGTG (SEQ ID NO: |
| (SEQ ID NO: 148) | 341) |
| 3300018080\|Ga0180433_10020043_6 | CTCGCAATCGAAGCTCCGCCCGTTGTAGGCGGAGAC (SEQ ID |
| (SEQ ID NO: 149) | NO: 342) |
| 3300018080\|Ga0180433_10021337_5 | GTCACAACGCCTGCGCAAGGGCTTTGTTATTGCGAC (SEQ ID |
| (SEQ ID NO: 150) | NO: 336) |
| 3300018080\|Ga0180433_10021840_7 | TGGAAGAGCCATCGCAATGGCTTCGGATTGCGAC (SEQ ID |
| (SEQ ID NO: 151) | NO: 343) |
| 3300018080\|Ga0180433_10021840_7 | TGGAAGAGCCATCGCAATGGCTTCGGATTGCGAC (SEQ ID |
| (SEQ ID NO: 152) | NO: 343) |
| 3300001256\|JGI12210J13797_10495608_9 | CACGAAAAGGCAGCTCGATGCCTTACAAATCGAGAC (SEQ ID |
| (SEQ ID NO: 153) | NO: 344) |
| 3300001256\|JGI12210J13797_10495610_14 | CACGAAAAGGCAGCTCGATGCCTTACAAATCGAGAC (SEQ ID |
| (SEQ ID NO: 153) | NO: 344) |
| 3300005917\|Ga0075115_10002831_4 | AGAAATGGTTGTGAAATGCCTTTAAAATTTCAAC (SEQ ID |
| (SEQ ID NO: 154) | NO: 345) |
| 3300005918\|Ga0075116_10002890_7 | ACAGAAATGGTAGTGGAATGCCTTTAAAATT (SEQ ID NO: |
| (SEQ ID NO: 155) | 346) |
| 3300011414\|Ga0137442_1000121_10 | GCCACAGCACCTGCTCGAACGGTTCGAGTTCGAGAC (SEQ ID |
| (SEQ ID NO: 156) | NO: 347) |
| 3300011431\|Ga0137438_1001223_2 | GCCACAGCACCTGCTCGAACGGTTCGAGTTCGAGAC (SEQ ID |
| (SEQ ID NO: 156) | NO: 347) |
| 3300011441\|Ga0137452_1000071_9 | CTGAAAACGCCAGCGCGAAGGCTTCATATTCGCGAC (SEQ ID |
| (SEQ ID NO: 157) | NO: 348) |
| 3300006855\|Ga0079044_1002244_2 | GTGCAAGAGCCTGCGCCGAGGCGTCGTATCGGCGACA (SEQ |
| (SEQ ID NO: 158) | ID NO: 349) |
| 3300006855\|Ga0079044_1002244_2 | GTGCAAGAGCCTGCGCCGAGGCGTCGTATCGGCGACA (SEQ |
| (SEQ ID NO: 159) | ID NO: 349) |
| 3300009503\|Ga0123519_10000481_19 | GTGGAAAGGGTATCTCTGGACCTTACAATCAGAGAC (SEQ ID |
| (SEQ ID NO: 160) | NO: 350) |
| 3300009503\|Ga0123519_10000481_22 | GTGGAAAGGGTATCTCTGGACCTTACAATCAGAGAC (SEQ ID |
| (SEQ ID NO: 161) | NO: 350) |
| 3300006865\|Ga0073934_10032691_1 | GCCGCAACGCCTGTGGAAGGGC (SEQ ID NO: 351) |
| (SEQ ID NO: 162) | |
| 3300001340\|JGI20133J14441_1002607_2 | GGTGCAGCGGTTGCTCAGCACCGTAGAAGCTGAGAG (SEQ ID |
| (SEQ ID NO: 163) | NO: 352) |
| 3300009784\|Ga0123357_10000018_105 | CCCGTGCCCGTCTCCGTCTCC (SEQ ID NO: 353) |
| (SEQ ID NO: 164) | |
| 3300009784\|Ga0123357_10000074_42 | GATCGCGACGGCGACGGTATCC (SEQ ID NO: 354) |
| (SEQ ID NO: 165) | |
| 3300009784\|Ga0123357_10000076_32 | GGCGTCCGCCAGCGTCGGGGCAACCACACCGACGAC (SEQ ID |
| (SEQ ID NO: 166) | NO: 355) |
| BBPF01004549_6 (SEQ ID NO: 167) | GTTGCAGTGCCCAGCTCAGGGGCTTGATAACTGAGAC (SEQ |
| | ID NO: 356) |
| BBPG01001333_4 (SEQ ID NO: 167) | GTTGCAGTGCCCAGCTCAGGGGCTTGATAACTGAGAC (SEQ |
| | ID NO: 356) |
| OGZV01009429_1 (SEQ ID NO: 168) | TAGTGAGTTTAGCACATTTCTAAAAC (SEQ ID NO: 357) |
| OKWZ01000119_10 (SEQ ID NO: 169) | GTTTAAGTAGTAGTGAGTTTAGCACATCTCTAAAAC (SEQ ID |
| | NO: 358) |
| ODGR01000476_16 (SEQ ID NO: 170) | TTAAGTAGTAGTGAGTTTAGCATATTTCTAAAACG (SEQ ID |
| | NO: 359) |
| ODIG01000268_14 (SEQ ID NO: 169) | GTTTAAGTAGTAGTGAGTTTAGCACATCTCTAAAAC (SEQ ID |
| | NO: 358) |
| ODIP01002140_2 (SEQ ID NO: 171) | TAAGTAATAGTGAGTTTAGCACATCTCTAAAAC (SEQ ID |
| | NO: 360) |
| ODIW01000227_18 (SEQ ID NO: 171) | TTAAGTAATAGTGAGTTTAGCACATCTCTAAAAC (SEQ ID |
| | NO: 361) |
| ODJA01000260_38 (SEQ ID NO: 169) | GTTTAAGTAGTAGTGAGTTTAGCACATCTCTAAAAC (SEQ ID |
| | NO: 358) |
| ODJP01000229_55 (SEQ ID NO: 169) | GTTTAAGTAGTAGTGAGTTTAGCACATCTCTAAAAC (SEQ ID |
| | NO: 358) |
| ODKZ01007116_1 (SEQ ID NO: 172) | TTAAGTAGTAGTGAGTTTAGCATATTTCTAAAACG (SEQ ID |
| | NO: 359) |
| ODMO01000523_12 (SEQ ID NO: 169) | GTTTAAGTAGTAGTGAGTTTAGCACATCTCTAAAAC (SEQ ID |
| | NO: 358) |
| ODTN01000195_35 (SEQ ID NO: 169) | GTTTAAGTAGTAGTGAGTTTAGCACATCTCTAAAAC (SEQ ID |
| | NO: 358) |
| ODTP01000194_18 (SEQ ID NO: 172) | GGTTAAGTAGTAGTGAGTTTAGCACATCTCTAAAAC (SEQ ID |
| | NO: 362) |
| ODWI01002981_3 (SEQ ID NO: 169) | GTTTAAGTAGTAGTGAGTTTAGCACATTTCTA (SEQ ID NO: |
| | 363) |
| ODZZ01005262_2 (SEQ ID NO: 169) | GTTTAAGTAGTAGTGAGTTTAGCACATCTCTAAAAC (SEQ ID |
| | NO: 358) |
| OEED01000500_25 (SEQ ID NO: 173) | TAAGTAATAGTGAGTTTAGCACATCTCTAAAAC (SEQ ID |
| | NO: 360) |
| OEFT01000529_3 (SEQ ID NO: 169) | GTTTAAGTAGTAGTGAGTTTAGCACATCTCTAAAAC (SEQ ID |
| | NO: 358) |
| LAZR01002400_15 (SEQ ID NO: 174) | GTAGCAATGGCAGCGCATCGCCTTTTAAGATGCGAC (SEQ ID |
| | NO: 364) |
| LAZR01002400_19 (SEQ ID NO: 175) | GTAGCAATGGCAGCGCATCGCCTTTTAAGATGCGAC (SEQ ID |
| | NO: 364) |
| FLSK01003024_2 (SEQ ID NO: 169) | GTTTAAGTAGTAGTGAGTTTAGCACATCTCTAAAAC (SEQ ID |
| | NO: 358) |
| OFLM01000072_9 (SEQ ID NO: 176) | TAATGAGTTTAGCATATCTCTAAAAC (SEQ ID NO: 365) |
| OFLO01000090_50 (SEQ ID NO: 176) | TGAGTTTAGCATATCTCTAAAAC (SEQ ID NO: 366) |
| OFLU01000140_22 (SEQ ID NO: 177) | GGTTAAGTAGTAGTGAGTTTAGCATATCTCTAAAAC (SEQ ID |
| | NO: 367) |
| OFLV01000230_3 (SEQ ID NO: 177) | GGTTAAGTAGTAGTGAGTTTAGCATATCTCTAAAAC (SEQ ID |
| | NO: 367) |
| OGCY01000078_30 (SEQ ID NO: 178) | GGTTAAGTAGTAGTGAGTTTAGCACATCTCTAAAAC (SEQ ID |
| | NO: 362) |
| OGJO01000473_2 (SEQ ID NO: 169) | GTTTAAGTAGTAGTGAGTTTAGCACATCTCTAAAAC (SEQ ID |
| | NO: 358) |
| OGJT01000109_37 (SEQ ID NO: 179) | GGTTAAATAGTAGTGAGTTTAGCACATCTCTAAAAC (SEQ ID |
| | NO: 368) |
| OGJZ01005194_5 (SEQ ID NO: 180) | GGTTAAGTAGTAGTGAGTTTAGCATATCTCTAAAAC (SEQ ID |
| | NO: 367) |
| OGKO01001669_8 (SEQ ID NO: 181) | GGTTAAGTAGTAGTGAGTTTAGCACATCTCTAAAAC (SEQ ID |
| | NO: 362) |
| OFCI01000292_37 (SEQ ID NO: 182) | GTAACAGAGGCTGCTCAATGCCTTTGAAATTGAGAC (SEQ ID |
| | NO: 369) |
| 3300006048\|Ga0075363_100000001_25 | GTAACAATCCCAGTGCAACGGGTTAGTAGTTGCAAC (SEQ ID |
| (SEQ ID NO: 183) | NO: 370) |
| 3300006048\|Ga0075363_100000001_20 | GTAACAATCCCAGTGCAACGGGTTAGTAGTTGCAAC (SEQ ID |
| (SEQ ID NO: 184) | NO: 370) |
| 3300006048\|Ga0075363_100000020_49 | GTGTGGAGGCAGCTCGGTGCCGATGGAAACTGAGAC (SEQ ID |
| (SEQ ID NO: 185) | NO: 371) |
| 3300006178\|Ga0075367_10000108_6 | GTAACAATCCCAGTGCAACGGGTTAGTAGTTGCAAC (SEQ ID |
| (SEQ ID NO: 183) | NO: 370) |
| 3300006178\|Ga0075367_10000108_6 | GTAACAATCCCAGTGCAACGGGTTAGTAGTTGCAAC (SEQ ID |
| (SEQ ID NO: 184) | NO: 370) |
| 3300006195\|Ga0075366_10000160_13 | GTAACAATCCCAGTGCAACGGGTTAGTAGTTGCAAC (SEQ ID |
| (SEQ ID NO: 183) | NO: 370) |
| 3300009500\|Ga0116229_10010095_9 | CTTGCAATGGCTGCGCAGGGCCTTGGACGCTGCGAC (SEQ ID |
| (SEQ ID NO: 186) | NO: 372) |
| 3300009701\|Ga0116228_10018148_5 | TCGAATTCGGTTGACGCT (SEQ ID NO: 373) |
| (SEQ ID NO: 187) | |
| 3300005577\|Ga0068857_100000008_197 | GTTGGCAATAGAAGCTAACCTCTATAAGCGTTAGACC (SEQ |
| (SEQ ID NO: 188) | ID NO: 374) |
| 3300005338\|Ga0068868_100030384_5 | GTGGAGAGGCCAGCGCAGGGGCTTTGTGCCTGCGAC (SEQ ID |
| (SEQ ID NO: 189) | NO: 375) |
| 3300005841\|Ga0068863_100041042_2 | GTTGAAAACCCCATCGATTCGGGGTAGTG (SEQ ID NO: |
| (SEQ ID NO: 190) | 376) |
| 3300013306\|Ga0163162_10000022_153 | CTCGCAAGCGTTGCTCGACACGCTAGGTGTCGAGAC (SEQ ID |
| (SEQ ID NO: 191) | NO: 377) |
| 3300009148\|Ga0105243_10000126_60 | TCGTCCTGCAGCGTGATCCCGCC (SEQ ID NO: 378) |
| (SEQ ID NO: 192) | |
| 3300006846\|Ga0075430_100000057_67 | GCCGTCGAAATGCCTGCTCGGGGGCTTCGTACCTGAGAC (SEQ |
| (SEQ ID NO: 193) | ID NO: 379) |
| 3300006853\|Ga0075420_100000070_3 | GCCGTCGAAATGCCTGCTCGGGGGCTTCGTACCTGAGAC (SEQ |
| (SEQ ID NO: 193) | ID NO: 379) |
| 3300006854\|Ga0075425_100000037_57 | GTGTGGAGGCAGCTCGGTGCCGATGGAAACTGAGAC (SEQ ID |
| (SEQ ID NO: 185) | NO: 371) |
| 3300006903\|Ga0075426_10000611_28 | AAGAGCATCCCGGGCGCGAA (SEQ ID NO: 380) |
| (SEQ ID NO: 194) | |
| 3300006914\|Ga0075436_100000782_9 | AAGAGCATCCCGGGCGCGAA (SEQ ID NO: 380) |
| (SEQ ID NO: 194) | |
| 3300007076\|Ga0075435_100000061_47 | AAGAGCATCCCGGGCGCGAA (SEQ ID NO: 380) |
| (SEQ ID NO: 194) | |
| 3300007076\|Ga0075435_100000750_29 | GTGTGGAGGCAGCTCGGTGCCGATGGAAACTGAGAC (SEQ ID |
| (SEQ ID NO: 185) | NO: 371) |
| 3300009100\|Ga0075418_10076301_2 | GTAGGAACCCCTAGTGTCCTGGGTGGAGAGGACAAC (SEQ ID |
| (SEQ ID NO: 195) | NO: 381) |
| 3300009100\|Ga0075418_10076301_2 | GTAGGAACCCCTAGTGTCCTGGGTGGAGAGGACAAC (SEQ ID |
| (SEQ ID NO: 196) | NO: 381) |
| 3300009156\|Ga0111538_10081463_8 | GCGCGGGGGCTTGGTTCCTGCGAC (SEQ ID NO: 382) |
| (SEQ ID NO: 197) | |
| 3300005548\|Ga0070665_100000073_173 | GAAACAAAGCGTGCTCTGCCGCTTGGAAGCAGAGAC (SEQ ID |
| (SEQ ID NO: 198) | NO: 383) |
| OBLM01000011_1 (SEQ ID NO: 199) | CGTGACGATGGTTGCTCG (SEQ ID NO: 384) |
| OCTA010000646_37 (SEQ ID NO: 200) | AATCCCTGCTCAAGAGGGTGTGTCTTGAGAC (SEQ ID NO: |
| | 385) |
| ODAK010001378_33 (SEQ ID NO: 201) | CTCGCAATCGTTGCTGGACGGACTTCTCGTTCAGAC (SEQ ID |
| | NO: 386) |
| ODAK010029943_5 (SEQ ID NO: 202) | GTCGAAATGCCCGCTCAGCGGCTTAGTTGCTGAGAC (SEQ ID |
| | NO: 387) |
| ODAK010029943_6 (SEQ ID NO: 203) | GTCGAAATGCCCGCTCAGCGGCTTAGTTGCTGAGAC (SEQ ID |
| | NO: 387) |
| 3300005602\|Ga0070762_10000001_34 | GTCGAGATCAGGCTCCATGAGATCGACCATGGAGAC (SEQ ID |
| (SEQ ID NO: 204) | NO: 388) |
| 3300005602\|Ga0070762_10000001_32 | GTCGAGATCAGGCTCCATGAGATCGACCATGGAGAC (SEQ ID |
| (SEQ ID NO: 205) | NO: 388) |
| 3300006796\|Ga0066665_10000988_15 | GGTGACAAAGCCCTGTGCAGCGGGCTCAAAGCTGCGAC (SEQ |
| (SEQ ID NO: 206) | ID NO: 389) |
| 3300018429\|Ga0190272_10000030_113 | GTCGCAACGCCTGCGTCGGGGCCTCGTGCCGACGAC (SEQ ID |
| (SEQ ID NO: 207) | NO: 390) |
| 3300018432\|Ga0190275_10000082_154 | GCAATGGCTGCTCAGCGCCCTTGAAGCTGAGAC (SEQ ID |
| (SEQ ID NO: 208) | NO: 391) |
| 3300018481\|Ga0190271_10027355_3 | AGCCTGCGCGGTGGCTGAGGACCGCGAC (SEQ ID NO: |
| (SEQ ID NO: 209) | 392) |
| 3300019874\|Ga0193744_1000265_21 | GTGTGGAGGCTGCTCAAGGCCGATGGAACTTGAGAC (SEQ ID |
| (SEQ ID NO: 210) | NO: 393) |
| 3300020021\|Ga0193726_1013919_1 | GGTGGCACGAGTTGCTCGGCGCTCTACGAGCCGAGAC (SEQ |
| (SEQ ID NO: 211) | ID NO: 394) |
| 3300020021\|Ga0193726_1013919_1 | GGTGGCACGAGTTGCTCGGCGCTCTACGAGCCGAGAC (SEQ |
| (SEQ ID NO: 212) | ID NO: 394) |
| 3300020034\|Ga0193753_10002988_10 | AACATCTGCTCGATCGATCCGAGATCGAGCC (SEQ ID NO: |
| (SEQ ID NO: 213) | 395) |
| 3300020034\|Ga0193753_10002988_9 | AACATCTGCTCGATCGATCCGAGATCGAGCC (SEQ ID NO: |
| (SEQ ID NO: 214) | 395) |
| 3300020156\|Ga0196970_1000866_40 | TGGAAACCCTGCGCAGGGGGTTAAAGCCTGCGAC (SEQ ID |
| (SEQ ID NO: 215) | NO: 396) |
| 3300020579\|Ga0210407_10000200_14 | GTCTCAATGGCTGCGACGAGCCGTGCAATCGTCGAC (SEQ ID |
| (SEQ ID NO: 216) | NO: 397) |
| 3300020580\|Ga0210403_10000550_35 | GTCTCAATGGCTGCGACGAGCCGTGCAATCGTCGAC (SEQ ID |
| (SEQ ID NO: 216) | NO: 397) |
| 3300020580\|Ga0210403_10001296_17 | CGCAAGCATTCGTCACAATCA (SEQ ID NO: 398) |
| (SEQ ID NO: 217) | |
| 3300020581\|Ga0210399_10010852_9 | GTTGTAGAGGTAACGAAGCACCTGAAAGACTTCGAG (SEQ ID |
| (SEQ ID NO: 218) | NO: 399) |
| 3300020583\|Ga0210401_10033176_5 | GGTAGCGAAACACCTTGAAG (SEQ ID NO: 400) |
| (SEQ ID NO: 217) | |
| 3300005435\|Ga0070714_100002341_12 | GTGGAAAAGAGCAGCGCGGGGCTCCAACGCCGCGAC (SEQ ID |
| (SEQ ID NO: 219) | NO: 401) |
| 3300009095\|Ga0079224_100000262_28 | GCTGCAAAGGACGTGGCGTTCCTTGAACACGCCAAC (SEQ ID |
| (SEQ ID NO: 220) | NO: 402) |
| 3300009095\|Ga0079224_100170797_3 | GTTGCAATGCCGACTCCGCGGCTTGGTTGCGGAGAGG (SEQ |
| (SEQ ID NO: 221) | ID NO: 403) |
| 3300010343\|Ga0074044_10013672_1 | GTCGCAGGTGATGCTCTGAGGCTTTGGATCGGAGAC (SEQ ID |
| (SEQ ID NO: 222) | NO: 404) |
| 3300010343\|Ga0074044_10041345_4 | GTGGAAAGGGCAGCGCAGAGCCCGTGATGCTGCGAC (SEQ ID |
| (SEQ ID NO: 223) | NO: 405) |
| 3300005468\|Ga0070707_100000083_12 | CGGCGTGCCCTCGTCCTGCACCGTGATCCCGGC (SEQ ID |
| (SEQ ID NO: 224) | NO: 406) |
| 3300006163\|Ga0070715_10000067_44 | GCGACTGCGTTTGCTCGGTGACGGGTTCACCGAGAC (SEQ ID |
| (SEQ ID NO: 225) | NO: 407) |
| 3300014498\|Ga0182019_10003703_1 | GTAACAATGCCAGCCCAGAGGCAAAGGTTCTGGGAC (SEQ ID |
| (SEQ ID NO: 226) | NO: 408) |
| 3300001131\|JGI12631J13338_1000296_13 | GTGCAGCCCCTGGGCACGTGGGCGACGG (SEQ ID NO: |
| (SEQ ID NO: 227) | 409) |
| 3300001593\|JGI12635J15846_10002852_1 | GTGCAGCCCCTGGGCACGTGGGCGACGG (SEQ ID NO: |
| (SEQ ID NO: 227) | 409) |
| 3300009813\|Ga0105057_1000075_5 | GATCACACGGCGACCTCCGCCGCCTCGAAGCGGAGAC (SEQ |
| (SEQ ID NO: 228) | ID NO: 410) |
| 3300009813\|Ga0105057_1000075_5 | GATCACACGGCGACCTCCGCCGCCTCGAAGCGGAGAC (SEQ |
| (SEQ ID NO: 229) | ID NO: 410) |
| 3300014489\|Ga0182018_10031574_1 | CTCACAACGGCAGCGAGGCGCCTTGGAGTCCTCGAC (SEQ ID |
| (SEQ ID NO: 230) | NO: 411) |
| 3300014501\|Ga0182024_10047267_8 | GTAGCAAGAGGTGCTCATGCCTCTAGAATATGAGAC (SEQ ID |
| (SEQ ID NO: 231) | NO: 412) |
| 3300014501\|Ga0182024_10150440_2 | GTAGCAAAGGCAGCTTGACGCCTTAAAGATCAAGAC (SEQ ID |
| (SEQ ID NO: 232) | NO: 413) |
| 3300001356\|JGI12269J14319_10001968_12 | CTCGCAACGCCAGCGCAGGGGCCATGACGCTGCGAC (SEQ ID |
| (SEQ ID NO: 233) | NO: 414) |
| 3300007533\|Ga0102944_1012316_2 | GCATCAAAGGCAGTCCGATGCCTCTCAAATCGGAAC (SEQ ID |
| (SEQ ID NO: 234) | NO: 415) |
| 3300005903\|Ga0075279_10000001_30 | GTTGGAAAGGCTGCTCGAACGCCTTCAAGTCGAGAG (SEQ ID |
| (SEQ ID NO: 235) | NO: 416) |
| 3300005524\|Ga0070737_10002282_10 | CCGTGCGCAGCCGGATAACGCTGCGAC (SEQ ID NO: 417) |
| (SEQ ID NO: 236) | |
| 3300005524\|Ga0070737_10031205_1 | GTCGCGAAGCTAGCGCAGAAGCTTGGTATCTGCGAG (SEQ ID |
| (SEQ ID NO: 237) | NO: 418) |
| 3300005524\|Ga0070737_10031205_1 | GTCGCGAAGCTAGCGCAGAAGCTTGGTATCTGCGAG (SEQ ID |
| (SEQ ID NO: 238) | NO: 418) |
| 3300005534\|Ga0070735_10023967_5 | GCATCAAGTCTTATCTCGC (SEQ ID NO: 419) |
| (SEQ ID NO: 239) | |
| 3300005542\|Ga0070732_10013271_3 | GGCAGCGAAACGCCTTGAAG (SEQ ID NO: 420) |
| (SEQ ID NO: 240) | |
| 3300010373\|Ga0134128_10000310_109 | GTGTAATGCCCGGCAGAAGGCTTTGGATTCTGCGAC (SEQ ID |
| (SEQ ID NO: 241) | NO: 421) |
| 3300010373\|Ga0134128_10011458_1 | GTAGCAATGCCTACCAAGAGGCTTTGTATCTTGTGAG (SEQ |
| (SEQ ID NO: 242) | ID NO: 422) |
| 3300010373\|Ga0134128_10096594_3 | GGCGCAAGCCCTGCGCGGGAGGGCAAGATCCTGCGAC (SEQ |
| (SEQ ID NO: 243) | ID NO: 423) |
| 3300010400\|Ga0134122_10000107_57 | CAAGCCACGCTCGGGTGGC (SEQ ID NO: 424) |
| (SEQ ID NO: 244) | |
| 3300010401\|Ga0134121_10002041_17 | GGAGAGGGATCGTTTCTTCGACC (SEQ ID NO: 425) |
| (SEQ ID NO: 245) | |
| 3300004633\|Ga0066395_10000027_32 | CCGACAACGCCTGCGCAGGGGCGTGGTTTCTGCGAC (SEQ ID |
| (SEQ ID NO: 246) | NO: 426) |
| 3300005332\|Ga0066388_100004304_4 | GGTGCAACGTGCCTTGCGAGGGCTTGATACTCGCGAC (SEQ |
| (SEQ ID NO: 247) | ID NO: 427) |
| 3300005332\|Ga0066388_100004304_2 | GGTGCAACGTGCCTTGCGAGGGCTTGATACTCGCGAC (SEQ |
| (SEQ ID NO: 248) | ID NO: 427) |
| 3300005764\|Ga0066903_100000051_27 | CCGACAACGCCTGCGCAGGGGCGTGGTTTCTGCGAC (SEQ ID |
| (SEQ ID NO: 246) | NO: 426) |
| 3300010047\|Ga0126382_10001209_14 | GGTGCAACGTGCCTTGCGAGGGCTTGATACTCGCGAC (SEQ |
| (SEQ ID NO: 249) | ID NO: 427) |
| 3300010047\|Ga0126382_10001209_12 | GGTGCAACGTGCCTTGCGAGGGCTTGATACTCGCGAC (SEQ |
| (SEQ ID NO: 248) | ID NO: 427) |
| 3300010048\|Ga0126373_10000093_102 | GTGGTAATGGCAGCGCAGCGCCTTTGAGACTGCGAC (SEQ ID |
| (SEQ ID NO: 250) | NO: 428) |
| 3300010366\|Ga0126379_10001683_10 | GTTGCAGTACCCTGCTCACGGGGGAGACAAGTGAGAG (SEQ |
| (SEQ ID NO: 251) | ID NO: 429) |
| 3300010376\|Ga0126381_100020658_4 | GGTGAAATGGCATCGGGAGGCCACAAACGTTCCGAC (SEQ ID |
| (SEQ ID NO: 252) | NO: 430) |
| 3300010398\|Ga0126383_10032213_5 | GTGATAGTGCCTGCTCAGTGGCTTAGT (SEQ ID NO: 431) |
| (SEQ ID NO: 253) | |
| 3300017961\|Ga0187778_10004454_1 | GTGACAAGAGCAGCGCGGCGCTCTGCGAGCCGCGAC (SEQ ID |
| (SEQ ID NO: 254) | NO: 432) |
| 3300017970\|Ga0187783_10000008_23 | CGAGTAGGCTTAGTTTGCTCGAC (SEQ ID NO: 433) |
| (SEQ ID NO: 255) | |
| 3300017972\|Ga0187781_10019688_5 | GGCGAAGCGTCAGCGCAGCCGTCTCGAGGCTGCGAC (SEQ ID |
| (SEQ ID NO: 256) | NO: 434) |
| 3300018064\|Ga0187773_10011230_2 | GTCGCGATGGCTGCTCGACGCCAGGAAGATCGAGAC (SEQ ID |
| (SEQ ID NO: 257) | NO: 435) |
| 3300012204\|Ga0137374_10001132_4 | GTCGAAATGCCCGCGCGGGGGCGTCGTACCCGCGAC (SEQ ID |
| (SEQ ID NO: 258) | NO: 436) |
| 3300012210\|Ga0137378_10000107_47 | GCGTGTAGTAAGAGCAGCGGTGTCGCTCTGAGATGCCGAC |
| (SEQ ID NO: 259) | (SEQ ID NO: 437) |
| 3300012532\|Ga0137373_10000316_4 | GTCGAAATGCCCGCGCGGGGGCGTCGTACCCGCGAC (SEQ ID |
| (SEQ ID NO: 258) | NO: 436) |
| 3300012532\|Ga0137373_10000407_43 | GCCCAAAGGCAGCTCGGCGCCTACAGAAGCCGAGAC (SEQ ID |
| (SEQ ID NO: 260) | NO: 438) |
| 3300012930\|Ga0137407_10020190_4 | GGTCGAAATGCCTGCGCAGGGGCTTCAACGCTGCGAC (SEQ |
| (SEQ ID NO: 261) | ID NO: 439) |
| 3300005987\|1071089\|scaffold14955_2 | ATCGAAGAGCCTGCGCAGAGGCTTTTGATCTGCGAT (SEQ ID |
| (SEQ ID NO: 262) | NO: 440) |
| 3300005988\|1071091\|scaffold06014_8 | ATCGAAGAGCCTGCGCAGAGGCTTTTGATCTGCGAT (SEQ ID |
| (SEQ ID NO: 262) | NO: 440) |
| 3300006056\|1071094\|scaffold118627_2 | ATCGAAGAGCCTGCGCAGAGGCTTTTGATCTGCGAT (SEQ ID |
| (SEQ ID NO: 262) | NO: 440) |

### REFERENCES

[0210] D. A. Benson et al., GenBank. Nucleic Acids Res. 41, D36-42 (2013).
[0211] K. D. Pruitt, T. Tatusova, G. R. Brown, D. R. Maglott, NCBI Reference Sequences (RefSeq): current status, new features and genome annotation policy. Nucleic Acids Res. 40, D130-135 (2012).
[0212] V. M. Markowitz et al., IMG: the Integrated Microbial Genomes database and comparative analysis system. Nucleic Acids Res. 40, D115-122 (2012).

### Example 2—Functional Validation of Engineered CLUST.018837 CRISPR-Cas Systems (FIGS. 6-11)

[0213] Having identified the minimal components of CLUST.018837 CRISPR-Cas systems, multiple example systems were selected for functional validation, from the sources designated NZ_LDOS01000005 (SEQ ID NO: 1), 3300009004 (SEQ ID NO: 9), APMI01033782 (SEQ ID NO: 26), NZ_LVXZ01000012 (SEQ ID NO: 3), and ADIG01000806 (SEQ ID NO: 20).

### DNA Synthesis and Effector Library Cloning

[0214] To test the activity of an exemplary CLUST.018837 CRISPR-Cas system, systems containing the pET28a(+) vector were designed and synthesized. The E. coli codon-optimized nucleic acid sequences encoding the selected CLUST.018837 effector proteins (amino acid sequence provided in TABLE 2) were synthesized (Genscript) and cloned into a custom expression system derived from the pET-28a(+) (EMD-Millipore) to create the Effector Plasmid. The engineered, non-naturally occurring vector included a nucleic acid encoding the CLUST.018837 effector protein under the control of a lac promoter and an E. coli ribosome binding sequence. The vector also included an acceptor site for a CRISPR array library driven by a J23119 promoter following the open reading frame for the CLUST.018837 effector protein (FIGS. 6A-D).

[0215] For the minimal CRISPR array, oligonucleotide library synthesis (OLS) pools comprising two direct repeats flanking natural-length spacer sequences targeting the pACYC184 plasmid, select E. coli essential genes, and non-targeting negative control spacers were designed for a total of 8900 elements in the array library. The spacer length was determined by the mode of the spacer lengths found in the endogenous CRISPR array. Flanking the minimal CRISPR array were unique PCR priming sites that enabled amplification of a specific library from a larger pool of oligo synthesis. These sequences were placed under the control of a J23119 promoter and cloned into the Effector Plasmid in both the forward and reverse orientations for a total library of ˜18,000 plasmid elements

[0216] The minimal CRISPR array library was next cloned into the Effector Plasmid using the Golden Gate assembly method. Briefly, each minimal CRISPR array from the OLS pool (Agilent Genomics) was first amplified using unique PCR primers, and pre-linearized the plasmid backbone using BsaI to reduce potential background. Both DNA fragments were purified with Ampure® XP (Beckman Coulter) prior to addition to Golden Gate Assembly Master Mix (New England Biolabs) and incubated per the manufacturer's instructions. The Golden Gate reaction was further purified and concentrated to enable maximum transformation efficiency in the subsequent steps of the bacterial screen.

[0217] The plasmid library containing the distinct minimal CRISPR array and CLUST.018837 effector sequence was electroporated into E. Cloni® electrocompetent E. coli (Lucigen) using a Gene Pulser Xcell® (BioRad) following the protocol recommended by Lucigen. The library was co-transformed with purified pACYC184 plasmid, plated onto agar containing chloramphenicol (Fisher), tetracycline (Alfa Aesar), and kanamycin (Alfa Aesar) in BioAssay® dishes (Thermo Fisher), and incubated for 10-12 hours at 37° C. After estimation of approximate colony count to ensure sufficient library representation on the bacterial plate, the bacteria were harvested and plasmid DNA extracted using a QIAprep Spin Miniprep® Kit (Qiagen) to create an “output library.” By performing a PCR using custom primers containing barcodes and sites compatible with Illumina sequencing chemistry, a barcoded next generation sequencing library was generated from both the pre-transformation “input library” and the post-harvest “output library,” which were then pooled and loaded onto a Nextseq 550 (Illumina) to evaluate the effectors. At least two independent biological replicates were performed for each screen to ensure consistency.

### Bacterial Screen Sequencing Analysis

[0218] Next generation sequencing (NGS) data for screen input and output libraries were demultiplexed using Illumina bcl2fastq. Reads in resulting fastq files for each sample contained the CRISPR array elements for the screening plasmid library. The direct repeat sequence of the CRISPR array was used to determine the array orientation, and the spacer sequence was mapped to the source (pACYC184 or E. coli essential genes) or negative control sequence (GFP) to determine the corresponding target.

[0219] To identify specific parameters resulting in enzymatic activity and bacterial cell death, NGS was used to quantify and compare the representation of individual CRISPR arrays (i.e., repeat-spacer-repeat) in the PCR product of the input and output plasmid libraries. The array depletion ratio was defined as the normalized output read count divided by the normalized input read count. An array was considered to be “strongly depleted” if the depletion ratio was less than 0.33 (more than 3-fold depletion). When calculating the array depletion ratio across biological replicates, the maximum depletion ratio value for a given CRISPR array across all experiments (i.e., a strongly depleted array must be strongly depleted in all biological replicates) was taken. A matrix including array depletion ratios and the following features for each spacer target: target strand, transcript targeting, ORI targeting, target sequence motifs, flanking sequence motifs, and target secondary structure were generated. The degree to which different features in this matrix explained target depletion for CLUST.018837 systems was investigated, thereby yielding a broad survey of functional parameters within a single screen.

[0220] A matrix including array depletion ratios and the following features for each spacer target: target strand, transcript targeting, ORI targeting, target sequence motifs, flanking sequence motifs, and target secondary structure were generated. The degree to which different features in this matrix explained target depletion for CLUST.018837 systems was investigated, thereby yielding a broad survey of functional parameters within a single screen.

[0221] FIGS. 7A-E show the degree of depletion activity of the engineered compositions by plotting for a given target the normalized ratio of sequencing reads in the screen output versus the screen input.

[0222] To quantify depletion activity, an enrichment ratio was calculated as R_{treated}/Rᵢₙₚᵤₜ for each direct repeat and spacer. The normalized input read count was computed as:

Rᵢₙₚᵤₜ=# reads containing DR+spacer/total reads

[0223] where the reads counts were obtained from next-generation sequencing of the plasmid DNA library expressing a CLUST.018837 effector and associated crRNA prior to transformation. The normalized treated read count was computed as:

R_{treated}=(1+# reads containing DR+spacer)/total reads

[0224] where the read counts were obtained from next-generation sequencing of the plasmid DNA extracted from the surviving cells expressing CLUST.018837 effector and associated crRNA after antibiotic screening. A strongly depleted target had an enrichment less than ⅓, which was marked by the first vertical dashed line. Each CLUST.018837 effector was paired with a CRISPR array that took the form 5′-DR-[spacer]-DR-3′ or 5′-reverse_complement(DR)-[spacer]-reverse_complement(DR)-3′, and the depletion activity of both orientations of the DR are shown in the figure as indicated in the legend.

[0225] The results are plotted for each DR transcriptional orientation. In the functional screen for each composition, an active effector complexed with an active crRNA (expressed as a DR::spacer::DR) interferes with the ability of the pACYC184 to confer E coli resistance to chloramphenicol and tetracycline, resulting in cell death and depletion of the spacer element within the pool. Comparing the results of deep sequencing the initial DNA library (screen input) versus the surviving transformed E. coli (screen output) suggest specific target sequences and DR transcriptional orientation that enable an active, programmable CRISPR-Cas system. The screen also indicates that the effector complex is only active with one orientation of the DR.

[0226] FIGS. 8A-E depicts the location of strongly depleted targets for CLUST.018837 systems targeting pACYC184, and FIGS. 9A-E depicts the location of strongly depleted targets for CLUST.018837 systems targeting E. coli essential genes. FIGS. 10A-E and FIGS. 11A-E depict strongly depleted targets for the negative control, whereby the nucleotide sequence encoding the CLUST.018837 effector has been deleted from the construct being screened. Notably, the presence of many strongly depleted targets in FIGS. 9A-E without corresponding activity in FIGS. 11A-E indicates interference activity that is dependent upon the expression of the CLUST.018837 effector and programmed by the RNA guide. Conversely, the appearance of strongly depleted spacers in the region of the pACYC184 origin of replication in both FIGS. 8A-E and FIGS. 10A-E (particularly prominent in the case of 3300009004) suggests that the observed depletion activity in the origin of replication is not related to the CLUST.018837 effector activity.

[0227] FIGS. 12A-E depict the sequences flanking targets strongly depleted by CLUST.018837 CRISPR-Cas systems, indicating a prominent 5′ PAM of 5′-TTN-3′ or 5′-YTN-3′.

RNA-Sequencing Mature crRNA from In Vivo Bacterial Screen

[0228] Sequencing the small RNA from the in vivo bacterial screen began by extracting total RNA from harvested screen bacteria using the Direct-zol RNA MiniPrep® Plus w/ TRI Reagent (Zymo Research). Ribosomal RNA was removed using a Ribo-Zero® rRNA Removal Kit for Bacteria, followed by cleanup using an RNA Clean and Concentrator-5 kit. The resultant ribosomal RNA depleted total RNA was treated with T4 PNK, RNA 5′ polyphosphatase, prepared for sequencing using the NEBNext® Small RNA Library Prep Set.

[0229] The pre-crRNA processing in the screen output samples for the direct repeat orientation that demonstrated successful targeting of pACYC184 and E. coli essential genes was investigated. FIGS. 13A-C depict the alignment of extracted RNA against the input minimal CRISPR arrays, revealing the form of the mature crRNA. Mature crRNA sequences for example CLUST.018837 CRISPR-Cas systems are given in Table 4.

TABLE 4
Nucleotide Sequences of Mature crRNA of
Representative CLUST.018837 CRISPR-Cas systems

| CLUST.018837 Effector | |
|---|---|
| Protein Accession | Mature crRNA Sequence |
| WP_081130164.1 | TTTCATCGGCCATCGCGGCGG |
| (SEQ ID NO: 1) | CCTCGTAGCTGCGACNNNNNN |
| | NNNNNNNNNNNN |
| | (SEQ ID NO: 1001) |
| WP_081130164.1 | TTCATCGGCCATCGCGGCGGC |
| (SEQ ID NO: 1) | CTCGTAGCTGCGACNNNNNNN |
| | NNNNNNNNNNN |
| | (SEQ ID NO: 1002) |
| 3300009004\|Ga0100377_ | ACAACAGCCATTACCCTGGCT |
| 1000348_44 | TAGTAAGGGTGACNNNNNNNN |
| (SEQ ID NO: 9) | NNNNNNNNNN |
| | (SEQ ID NO: 1003) |
| ADIG01000806_20 | TTCCAAGGCGATCACAGCCGC |
| (SEQ ID NO: 20) | CTAGTAGTTGTGACNNNNNNN |
| | NNNNNNNNNNN |
| | (SEQ ID NO: 1004) |

### In Vitro Pre-crRNA Processing

[0230] In an effort to reconstitute processing of the NZ_LDOS0100005 pre-crRNA into a mature crRNA in vitro, a pre-crRNA oligonucleotide template containing a T7 promoter followed the sequence, direct repeat (DR)-spacer1-DR-spacer2-DR, was synthesized. The purified oligonucleotide template was PCR amplified to select for full-length products and expressed the pre-crRNA using T7 in vitro transcription. The in vitro transcribed pre-crRNA was incubated with 0.0675 uM-1 μM of purified NZ_LDOS0100005 in 1×NEB Buffer2 with or without magnesium for 30 min. at 37° C. The resulting product was treated with proteinase K, supplemented with EDTA, denatured at 65° C. for 3 min., and run out on a 15% TBE-urea PAGE gel for analysis by SYBR-gold staining. FIG. 14 shows pre-crRNA treated with effector protein is processed into a mature crRNA in a dose-dependent manner without a dependence on magnesium.

### Example 3—Adaptation of CLUST.018837 CRISPR-Cas System Effectors for Eukaryotic and Mammalian Activity

[0231] DNA-modifying CRISPR-Cas systems such as CLUST.018837, systems described herein have important applications in eukaryotic cells such as therapeutic modification of the genome, with example modifications including but not limited to; genotype correction, gene knockout, genetic sequence insertion/deletion (by homology directed repair or otherwise), single nucleotide modification, or gene regulation. These gene modification modalities can utilize either natural or engineered activities of the CLUST.018837 CRISPR-Cas systems.

[0232] Without wishing to be limited, the applications in eukaryotic cells for the CLUST.018837 CRISPR-Cas system can be divided up into those utilizing nuclease and non-nuclease (also known as nuclease-dead) functionalities. For nucleases, in some embodiments, the natural nuclease activity of the CLUST.018837 CRISPR effector may be sufficient for applications such as gene modification, while in other embodiments, the targeted nuclease activity can be augmented by the fusion of additional nuclease domains (such as FokI) to either a nuclease-weak or nuclease-inactivated CLUST.018837 CRISPR effector. For non-nuclease functionalities, such nuclease-weak or nuclease inactivated CLUST.018837 CRISPR effectors can either be used directly or be fused to other functional domains. Both nuclease and non-nuclease functionalities are subsequently described in greater detail.

[0233] To develop CLUST.018837 CRISPR Cas systems for eukaryotic applications, the constructs encoding the protein effectors and/or their fusions are first codon-optimized for expression in mammalian cells, and specific localization tags are optionally appended to either or both the N-terminus or C-terminus of the effector protein. These localization tags can include sequences such as nuclear localization signal (NLS) sequences, which localize the effector to the nucleus for modification of genomic DNA. Other accessory proteins, such as fluorescent proteins, may be further appended. It has been demonstrated that the addition of robust, “superfolding” proteins such as superfolding green fluorescent protein (GFP) can increase the activity of CRISPR enzymes in mammalian cells when appended to the effector (Abudayyeh et al. (2017) Nature 550(7675): 280-4, and Cox et al. (2017) Science 358(6366): 1019-27).

[0234] The codon-optimized sequence coding for the CLUST.018837 effector and appended accessory proteins, fusion proteins, and/or localization signals is then cloned into a eukaryotic expression vector with the appropriate 5′ Kozak eukaryotic translation initiation sequence, eukaryotic promoters, and polyadenylation signals. In mammalian expression vectors, these promoters can include, e.g., general promoters such as CMV, EF1a, EFS, CAG, SV40, and cell-type specific RNA polymerase II promoters such as Syn and CamKIIa for neuronal expression, and thyroxine binding globulin (TBG) for hepatocyte expression to name a few. Similarly, useful polyadenylation signals include, but are not limited to, SV40, hGH, and BGH. For expression of the pre-crRNA or mature crRNA, RNA polymerase III promoters such as H1 or U6 can be used.

[0235] Delivery of the complete effector and RNA guide to the eukaryotic cells or tissues of choice can come in many different forms. For delivery to cells, in some embodiments. Transfection or nucleofection can deliver DNA or RNA from which the protein and/or RNA guide(s) is/are synthesized and assembled by the cellular machinery into active protein complexes, or the ribonucleoproteins (RNPs) themselves can be pre-formed extracellularly and delivered as a complete complex. Other applications may require the use of viral delivery, in which case the eukaryotic expression vector can be a lentiviral plasmid backbone, adeno-associated viral (AAV) plasmid backbone, or similar plasmid backbone capable of use in recombinant viral vector production. In particular, the small size of the CLUST.018837 CRISPR effectors make them ideally make them ideally suited for packaging, even when fused with other functional domains, along with its crRNA and appropriate control sequences into a single adeno-associated virus particle; the packaging size limit of 4.7 kb for AAV may preclude the use of larger effectors, particularly if large cell-type specific promoters are used for expression control.

[0236] After adapting the sequences, delivery vectors, and methods for eukaryotic and mammalian use, the different constructs as described herein are characterized for performance. For nuclease-based applications, in some instances, for testing of the mammalian nuclease activity of various constructs, a genomic dsDNA cleavage assay was used with either NGS or Surveyor nuclease readout to quantify the efficiency of indel formation (Hsu et al. (2013). In addition to testing various construct configurations and accessory sequences on individual targets, pooled library-based approaches are used to determine 1) any targeting dependency of specific constructs in mammalian cells as well as 2) the effect of mismatch locations and combinations along the length of the targeting crRNA. Briefly, the pooled library includes a selection plasmid that expresses a target DNA containing different flanking sequences as well as mismatches to the guide or guides used in the screening experiment, such that the successful target recognition and cleavage results in depletion of the sequence from the library. Furthermore, targeted indel sequencing or unbiased genome-wide cleavage assays can be used to evaluate the specificity of the CLUST.018837 nuclease constructs (Hsu et al. (2013), Tsai et al. (2015), Kim et al. (2015), Tsai et al. (2017)).

[0237] In addition to nuclease-based genome editing using CLUST.018837 effectors and a crRNA, additional template DNA sequences can be co-delivered either in a vector, such as an AAV viral vector, or as linear single stranded or double stranded DNA fragments. For insertion of template DNA by homology directed repair (HDR), template sequences are designed containing a payload sequence to be inserted into the locus of interest as well as flanking sequences that are homologous to endogenous sequences flanking the desired insertion site. In some instances, for insertion of short DNA payloads less than (for example: less than 1 kb in length), flanking homologous sequences can be short (for example: ranging from 15 to 200 nt in length). In other instances, for the insertion of long DNA payloads (for example: 1 kb or greater in length), long homologous flanking sequences are required to facilitate efficient HDR (for example: greater than 200 nt in length). Cleavage of target genomic loci for HDR between sequences homologous to template DNA flanking regions can significantly increase the frequency of HDR. CLUST.018837 effector cleavage events facilitating HDR include, but are not limited to dsDNA cleavage, double nicking, and single strand nicking activity.

[0238] Applications can also be based on non-nuclease functionalities of the CLUST.018837 effector and constructs from the fusion of the effector with a functional domain. In this context, the CLUST.018837 effector refers to both the natural effector amino acid sequence as well as any functional modifications to reduce or eliminate its nuclease activity. CLUST.018837 effectors have programmable DNA binding activity, which can be directly used in applications such as DNA immunoprecipitation, or other domains can be appended onto the effector to provide further functionality. Activities of these domains include, but are not limited to, DNA base modification (ex: ecTAD and its evolved forms, APOBEC), DNA methylation (m⁶A methyltransferases and demethylases), localization factors (KDEL retention sequence, mitochondrial targeting signal), transcription modification factors (ex: KRAB, VP64). Additionally, domains can be appended to provide additional control, such as light-gated control (cryptochromes) and chemically inducible components (FKBP-FRB chemically inducible dimerization).

[0239] Optimizing the activity of such fusion proteins requires a systematic way of comparing linkers that connect the CLUST.018837 effector with the appended domain. These linkers may include, but are not limited to, flexible glycine-serine (GS) linkers in various combinations and lengths, rigid linkers such as the alpha-helix forming EAAAK sequence, XTEN linker (Schellenberger V, et al. Nat. Biotechnol. 2009; 27:1186-1190), as well as different combinations thereof (see TABLE 5). The various designs are then assayed in parallel over the same crRNA target complex and functional readout to determine which one yields the desired properties.

[0240] For adapting CLUST.018837 effectors for use in targeted DNA base modification (see, e.g., Gaudelli et al. (2017) “Programmable base editing of A•T to G•C in genomic DNA without DNA cleavage” Science 25 Oct. 2017), one begins with a panel of CLUST.018837 effectors that yielded strong interference activity in in vivo E. coli bacterial screens. These effectors, whether with nuclease-inactivating mutations or in their natural forms, are mammalian codon optimized and tested for specific and programmable dsDNA binding in an in vitro environment such as using an electrophoretic mobility shift assay (EMSA).

[0241] Next, a linker is used to create the fusion protein between CLUST.018837 effector and the base editing domain. Initially, this domain consists of the ecTadA(wt)/ecTadA*(7.10) heterodimer (hereafter referred to as the dCas12i-TadA heterodimer) engineered previously for hyperactivity and modification of dsDNA A•T dinucleotides to G•C (TABLE 7). Given the structural differences between the smaller CLUST.018837 effectors versus the previously characterized Cas9 effectors, alternate linker designs and lengths may yield the optimal design of the base editing fusion protein. Further optimization of the location of the nuclear localization sequence may also be required.

[0242] To evaluate the activity of the CLUST.018837-derived base editors, the HEK 293T cells are transiently transfected with the CLUST.018837 effector-TadA heterodimer construct, a plasmid expressing the crRNA, and optionally, a reporter plasmid if targeting the reporter and not an endogenous locus. The cells are harvested 48 hours after transient transfection, and the DNA is extracted and prepared for next generation sequencing. Analysis of the base composition of loci of samples containing the targeting vs. negative control non-targeting crRNAs provide information about the editing efficiency, and analysis of the sequences at computationally predicted sites of close sequence similarity yields information about the off-target activity.

[0243] One particular advantage of developing a DNA base editing system using CLUST.018837 effectors is that the small size, smaller than the existing Cas9 and Cas12a effectors, enables more ready packaging in AAV of CLUST.018837 effector-TadA heterodimer along with its crRNA and control elements without the need for protein truncations. This all-in-one AAV vector enables greater efficacy of in vivo base editing in tissues, which is particularly relevant as a path towards therapeutic applications of CLUST.018837 effectors.

TABLE 5
Amino Acid Sequences of Motifs and Functional
Domains in Engineered Variants
of CLUST.018837 CRISPR-Cas Effector Proteins

>LINKER_1
(SEQ ID NO: 1005)
GS
>LINKER_2
(SEQ ID NO: 1006)
GSGGGGS
>LINKER_3
(SEQ ID NO: 1007)
GGGGSGGGGSGGGGS
>LINKER_4
(SEQ ID NO: 1008)
GGSGGSGGSGGSGGSGGS
>LINKER 5 (Gaudelli et al., 2017)
(SEQ ID NO: 1009)
SGGSSGGSSGSETPGTSESATPESSGGSSGGS
>ecTadA(wt) (Gaudelli et al., 2017) [N-term fusion
to ecTadA*(7.10)]
(SEQ ID NO: 1010)
MSEVEFSHEYWMRHALTLAKRAWDEREVPVGAVLVHNNRVIGEGWNRPIG
RHDPTAHAEIMALRQGGLVMQNYRLIDATLYVTLEPCVMCAGAMIHSRIG
RVVFGARDAKTGAAGSLMDVLHHPGMNHRVEITEGILADECAALLSDFFR
MRRQEIKAQK KAQSSTD
>ecTadA*(7.10) (Gaudelli et al., 2017) [N-term
fusion to CRISPR nuclease]
(SEQ ID NO: 1011)
MSEVEFSHEYWMRHALTLAKRAWDEREVPVGAVLVHNNRVIGEGWNRPIG
RHDPTAHAEIMALRQGGLVMQNYRLIDATLYVTLEPCVMCAGAMIHSRIG
RVVFGARDAKTGAAGSLMDVLHHPGMNHRVEITEGILADECAALLSDFFR
MRRQEIKAQK KAQSSTD
[Cytidine deaminase, AID, APOBEC1: N-term fusion
(or optionally C-term)]
>AID-APOBEC1 (Dickerson et al., 2003, Komor et
al., 2017)
(SEQ ID NO: 1012)
[sequence omitted]
>Lamprey_AID-APOBEC1 (Rogozin et al., 2007, Komor
et al., 2017)
(SEQ ID NO: 1013)
MTDAEYVRIHEKLDIYTFKKQFFNNKKSVSHRCYVLFELKRRGERRACFW
GYAVNKPQSGTERGIHAEIFSIRKVEEYLRDNPGQFTINWYSSWSPCADC
AEKILEWYNQELRGNGHTLKIWACKLYYEKNARNQIGLWNLRDNGVGLNV
MVSEHYQCCRKIFIQSSHNQLNENRWLEKTLKRAEKRRSELSIMIQVKIL
HTTKSPAV
>APOBEC1_BE1 (Komor et al., 2016)
(SEQ ID NO: 1014)
[sequence omitted]

### Example 4—Minimal Type V-U1 System Interferes with Gene Expression from Supercoiled dsDNA In Vitro

### In Vitro Interference Activity

[0244] To recapitulate interference activity seen in in vivo screens, effectors were targeted against GFP in an in vitro transcription-translation assay. Pre-crRNAs under a 17 promoter containing direct repeat (DR)-spacer-direct repeat (DR), with a spacer targeting GFP, were PCR amplified to select for full-length product. Effector and sigma28 templates also under a T7 promoter, and RFP and GFP templates under a fliC promoter were PCR amplified as well. All templates were then incubated together in an in vitro transcription-translation assay at 37° C. GFP and RFP fluorescence were read every 10 minutes by a TECAN Infinite M Plex plate reader for 12 hours.

[0245] To calculate the fold depletion of GFP fluorescence, GFP signal was normalized to RFP signal at each time point, then the average fluorescence of two technical replicates was taken. GFP fluorescence depletion was then calculated by dividing the GFP signal of an effector incubated with a non-GFP targeting pre-crRNA by the GFP signal of an effector incubated with a GFP targeting pre-crRNA. Depletion of the GFP signal indicates that the effector has formed a functional RNP and interfered with the production of GFP. FIGS. 15A and 15B show the fold depletion of GFP over time by systems NZ_LDOS01000005 (SEQ ID NO: 1) and ADIG01000806 (SEQ ID NO: 20). Each effector demonstrated interference activity only when targeted against supercoiled plasmid expressing GFP, with a maximum depletion of GFP fluorescence around three-fold.

[0246] Pre-crRNA 17 template DNA sequences and primers used in the in vitro transcription-translation assay are listed in Table 6. Sequences for the GFP linear DNA and plasmid target DNA used for the in vitro transcription-translation assay are set forth in SEQ ID NO: 1075 and SEQ ID NO: 1076, respectively.

[0247] To assess the roles of the conserved putative RuvC domains found in NZ_LDOS01000005 and ADIG01000806 systems, point mutants were generated within putative RuvC I (H297A, D303A for NZ_LDOS01000005, H300A, D306A for ADIG01000806), RuvC II (E311A, D504A for NZ_LDOS01000005 and E332A. E516A for ADIG01000806), and RuvC III (D559A for NZ_LDOS01000005 and D569A for ADIG01000806) motifs and the resultant variants were evaluated for in vitro interference activity. FIGS. 16A-L demonstrate that mutation of amino acids within the putative RuvC domains of NZ_LDOS01000005 and ADIG01000806 systems result in an changes in in vitro interference activity.

TABLE 6
Pre-crRNA T7 template DNA used in
NZ_LDOS01000005 and ADIG01000806
(Type V-U1) for vitro biochemistry

| | | Fwd | Rev | |
|---|---|---|---|---|
| Name | Template Sequence | Primer | Primer | FIGS. |
| NZ_LDOS01000005 | CCCAACAGAAGCAAACC | AAGGGAACT | CTATGCGTC | FIGs. |
| TS pre-crRNA | TCGGTCGCAGCTACGAG | TGACAATGT | CCTAATGGA | 15A-B |
| | GCCGCCGCGATGGCCGA | CA | GT | |
| | TGAAACCCTTCCAGTTC | (SEQ ID | (SEQ ID | |
| | GGTGATATACGGGATCT | NO: 1071) | NO: 1072) | |
| | CTTTCTGTCGCAGCTAC | | | |
| | GAGGCCGCCGCGATGGC | | | |
| | CGATGAAACCCCTATAG | | | |
| | TGAGTCGTATTA | | | |
| | (SEQ ID NO: 1067) | | | |
| NZ.LDOS01000005 | CCCAACAGAAGCAAACC | AAGGGAACT | CTATGCGTC | FIGs. |
| BS pre-crRNA | TCGGTCGCAGCTACGAG | TGACAATGT | CCTAATGGA | 15A-B |
| | GCCGCCGCGATGGCCGA | CA | GT | |
| | TGAAACTATCCCGCGTT | (SEQ ID | (SEQ ID | |
| | ATCATCACATTACCTAC | NO: 1071) | NO: 1072) | |
| | CACACCGTCGCAGCTAC | | | |
| | GAGGCCGCCGCGATGGC | | | |
| | CGATGAAACCCCTATAG | | | |
| | TGAGTCGTATTA | | | |
| | (SEQ ID NO: 1068) | | | |
| ADIG01000806 | CCCAACAGAAGCAAACC | AAGGGAACT | CTATGCGTC | FIGs. |
| TS pre-crRNA | TCGGTCACAACTACTAG | TGACAATGT | CCTAATGGA | 15A-B |
| | GCGGCTGTGATCGCCTT | CA | GT | |
| | GGAATCGCCTTCCAGTT | (SEQ ID | (SEQ ID | |
| | CGGTGATATACGGGATC | NO: 1073) | NO: 1074) | |
| | TCTTTCTGTCACAACTA | | | |
| | CTAGGCGGCTGTGATCG | | | |
| | CCTTGGAATCCCTATAG | | | |
| | TGAGTCGTATTA | | | |
| | (SEQ ID NO: 1069) | | | |
| ADIG01000806 | CCCAACAGAAGCAAACC | AAGGGAACT | CTATGCGTC | FIGs. |
| BS pre-crRNA | TCGGTCACAACTACTAG | TGACAATGT | CCTAATGGA | 15A-B |
| | GCGGCTGTGATCGCCTT | CA | GT | |
| | GGAATCATATCCCGCGT | (SEQ ID | (SEQ ID | |
| | TATCATCACATTACCTA | NO: 1073) | NO: 1074) | |
| | CCACACCGTCACAACTA | | | |
| | CTAGGCGGCTGTGATCG | | | |
| | CCTTGGAATCCCTATAG | | | |
| | TGAGTCGTATTA | | | |
| | (SEQ ID NO: 1070) | | | |

### Example 5—Minimal Type V-U1 System Cleaves Supercoiled dsDNA In Vitro (FIGS. 17A-H)

[0248] Detection of Supercoiled dsDNA Cleavage by Type V-UI CRISPR Effectors

[0249] To elucidate the molecular basis of interference of gene expression by the NZ_LDOS01000005 and ADIG01000806 systems, reactions from the above in vitro GFP interference assay were prepared for next generation sequencing (NGS). Reactions were quenched with EDTA and RNAse, then SPRI purified to isolate plasmid DNA. The plasmid DNA was then treated with NEBNext dsDNA Fragmentase (NEB) to generate fragments of DNA of ˜75 or 150 base pairs (bio-replicate 1 and 2, respectively) in length.

[0250] Fragments were then prepared for Illumiina next generation sequencing using New England Biolab's NEBNext Ultra DNA Library Prep Kit for Illumina. Sequencing was performed on an Illumina NextSeq 550 using. Reads were aligned to the sequence of GFP plasmid and normalized to total reads. Both NZ_LDOS01000005 and ADIG01000806 displayed nuclease activity when either the top or bottom strand was targeted across two biological replicates, with NZ_LDOS01000005 having a higher average cleavage frequency than ADIG01000806.

[0251] FIGS. 17A-H show that the cleavage by NZ_LDOS01000005 and ADIG01000806 systems appear to result in a nick at position 19 within the crRNA:target DNA duplex and a nick on the reciprocal DNA strand 10 bp downstream of the crRNA:target DNA duplex. These nicks are 28 bp downstream from one another within the crRNA:target DNA duplex.

### OTHER EMBODIMENTS

[0252] It is to be understood that while the invention has been described in conjunction with the detailed description thereof, the foregoing description is intended to illustrate and not limit the scope of the invention, which is defined by the scope of the appended claims. Other aspects, advantages, and modifications are within the scope of the following claims.

What is claimed is:

1. A composition comprising a CRISPR-Cas effector protein or a nucleic acid encoding the CRISPR-Cas effector protein, wherein the CRISPR-Cas effector protein has at least 80% identity to an amino acid sequence set forth in any one of SEQ ID NOs: 1057-1066.

2. The composition of claim 1, wherein the CRISPR-Cas effector protein has an amino acid sequence set forth in any one of SEQ ID NOs: 1057-1066.

3. A composition comprising a CRISPR-Cas effector protein or a nucleic acid encoding the CRISPR-Cas effector protein, wherein the CRISPR-Cas effector protein comprises a mutation in a RuvC motif.

4. The composition of any previous claim, wherein the CRISPR-Cas effector protein comprises a mutation in a catalytic residue of a RuvC motif.

5. The composition of any previous claim, wherein the RuvC motif is a RuvC I, RuvC II, and/or RuvC III motif.

6. The composition of any previous claim, wherein the CRISPR-Cas effector protein comprises at least 10% less nuclease activity than a reference composition.

7. The composition of any previous claim, wherein the CRISPR-Cas effector protein lacks nuclease activity.

8. The composition of any previous claim, wherein the CRISPR-Cas effector protein comprises at least 10% greater nuclease activity than a reference composition.

9. The composition of any previous claim, wherein the composition further comprises an RNA guide or a nucleic acid encoding the RNA guide, wherein the RNA guide comprises a direct repeat sequence and a spacer sequence, wherein the CRISPR-Cas effector protein binds to the RNA guide, and wherein the spacer sequence binds to a target nucleic acid.

10. The composition of any previous claim, wherein the spacer sequence comprises between 15 and 24 nucleotides in length.

11. The composition of any previous claim, wherein the spacer sequence comprises between 16 and 22 nucleotides in length.

12. The composition of any previous claim, wherein the target nucleic acid comprises a sequence complementary to a nucleotide sequence in the spacer sequence.

13. The composition of any previous claim, wherein the CRISPR-Cas effector protein recognizes a protospacer adjacent motif (PAM) sequence in the target nucleic acid, wherein the PAM sequence comprises a nucleotide sequence set forth as 5′-TTN-3′ or 5′-YTN-3′, wherein N is any nucleotide and Y is cytosine or thymine.

14. The composition of any previous claim, wherein the target nucleic acid is DNA.

15. The composition of any previous claim, wherein the target nucleic acid is supercoiled (e.g., plasmid) DNA.

16. The composition of any previous claim, wherein the CRISPR-Cas effector protein further comprises at least one nuclear localization signal (NLS), at least one nuclear export signal (NES), or at least one NLS and at least one NES.

17. The composition of any previous claim, wherein the nucleic acid encoding the CRISPR-Cas effector protein is codon-optimized for expression in a cell.

18. The composition of any previous claim, wherein the nucleic acid encoding the CRISPR-Cas effector protein is operably linked to a promoter.

19. The composition of any previous claim, wherein the nucleic acid encoding the CRISPR-Cas effector protein is in a vector.

20. The composition of any previous claim, wherein the vector comprises a retroviral vector, a lentiviral vector, a phage vector, an adenoviral vector, an adeno-associated vector, or a herpes simplex vector.

21. The composition of any previous claim, wherein the composition is present in a delivery system comprising a nanoparticle, a liposome, an exosome, a microvesicle, or a gene-gun.

22. A cell comprising the composition of any previous claim.

23. The cell of any previous claim, wherein the cell is a eukaryotic cell.

24. The cell of any previous claim, wherein the cell is a prokaryotic cell.

25. A method of expressing the composition in a cell, wherein the method comprises:
(a) providing the composition; and
(b) delivering the composition to the cell.

The application's sequence listing, which the Patent Office published only in electronic form, follows.

SEQUENCE LISTING (1076 sequences)

SEQ ID NO: 1 - protein, 627 aa, Metallibacterium scheffleri
MKLSPALPPTGDVLIYEYGARVDGDCLPAVGDQIAKARRLYNDLVAVIRGIVDEMRGFVLKHAGSEALALQARIDGLSEAFDAARAANDEDRMKQIAGERRALWAELGEQVKAVRKAHRAEIQELFLSRIGKKSTCDTYQMRCKAVGDGLGWATANQVLDAALQAFKTSFQRGQAPRFARGEEKIQDTLTLQFTAAGGVPVAALLSGDHSELSMVSSCGRRKYGSFSFRLGSASADTYANGTWQYHRPLPDGATVGLARLVRRSVGKDFKWALQLMVKRPATEPAMMEGRKPLVAVHFGWAGDASGRRVAGITDGADPGVARVLQLPVEVEDGIRRAAEFQSARDEARDVIMTTIKNIAWGDAVACLGESSQFMHGSEPWLRARLSEELSTIRRLPAQHVAPRRLHRLCGLLRATNQMHDELEAWRKQDRLAWQASAHMARRARNLRKDFYRRVAIDLARRYSAIVLEPLDLAAAALKVNEITGEKTEFAKKARSGRVVAAIYELESSIRWAAAKSGTALLDLSGAETAARCGICGGASQSDESNSQVLHCVECGAELDRKKNGAAIAWQFAHENLDEAVTDFWAAVIAQRCEHAEKTREKKAKMAEGRRLARTLSAGVSAVGSRNV

SEQ ID NO: 2 - protein, 633 aa, Thiobacillus denitrificans
MSEIKPSLLPQGNVLIYEYGARLDKDCIQAVGDQIIKSRRLYNDLVATIRGIVTEMKAFVLEKSGPDAQRCQEEIDALNAAFDAARAENNEDAMKCIAESRREKWRELAVFVKEARKNHRSDIQSMYLSRIGKNSACETYRIRSKAVADGLGWATANQVLDAALTAFKKSFARGNAPRFAVGEDKDQDTLTLQFTAAGGVPVDTILAGKHGEVALSPTNGCGPRKYGELRFRLGAAKAATNATGTWQYHRPLPDGATAGLCRLIRRRVGKDYKWAIQMQVKRPPIEQEALAGRKPLVAVHFGWAANDEGRCVAGITDGADPGQAYVLKLPAEVEQSLVRSSAIQSERDSARDAIVPRLKEIEVPDMDIESVESLPPDSPEVRLARAADELKAIHRLPANHVAIRRLHRLCGMLRDVDFLPEWLEDWRKEDRLQWQSAAHIARRARNTRKGFYRQTAIDLARQYSSIVLEPLDLAKAAVKIDEITGERTEFAKKARAGRVVAALYELESAIRWAAAKAGSAMFELTGETASRCSICGGDVLPDETNGQLLHCTECGADLDRKQNGAAMAWQLANDDLESLVEAFWTETFAARRSAENEQAEKKQKMAEGRRKARTPIGGENTEVSRDSGNGANA

SEQ ID NO: 3 - protein, 596 aa, Acidithiobacillus ferrooxidans
MSTITYEYGVRLEPDCIQHVDHQIILARGTYNEMIAAMRSVHDAAQSFQMEKAGPEGRAIAARIEALNTAFKEARAQQQEESLLQAIAVERRQCWRDLGVILKGVRQEHKKTLQEVFYNRIGINKGTDTYAIRCKAVADGLGWATAQDVLNRAIIAWKMSMKLGRAPQFARGDEKTQDALTVQFTEKGGMPKDKMLEGESAVIGVEQPENTGKRAYGHFWFRLGSASEGHYARGTIQWHRDLPEDASMASARLVRKRTGCKMKYYMQYVINTAQIRQVSDHARKALLAVHMGWSADISGRRVCGITDAADPELAQIIQLPPEIERNIQRAANIQGKRDQARDEIAPKIRAFDGSLPPEWDESTQDYWSHWKVLPANHMAASRIHAWRKRLGDFAPEWMAEWCKADRMLWIAATHTAQRARNRRKDFYRNLAKTWASQYEAIVIEKPDIKKAAKILDEATGERTEFAKKARAGRVLASLYTLDSAIRWACQKNGTAILDMNGEKTAATCAMCASEAIRADTEDGQVLHCADCGAVLDRKKNGAAVAWQLVNEQRENLVEEYWAEQLNKEREAAEAKASRLEKMQAARRAKREPALAD

SEQ ID NO: 4 - protein, 593 aa, Acidithiobacillus thiooxidans
MNLKVCGDIDDQIRRARAMYNNIIAVMRGIYDEMQTFTMEHAGPEGQALHEKIVAANVAFDAAKADNDEPRMKQIAMERRELWKALSIILKEVRKEHKNTLKERFYSRIGNNSSTETYQCRAEAIVGGLGYATATKVLDNALKAWQMSMVKGKAPRFARGEEKDQDTLTLQFSQAGGVPVEDIFTGKRKDIGIEYPKKGFGPRSYSAFRFRLGAASEESYAEGTVQLHRAIPENARIAMAHLTRKKAGRKYQYELQLLATLAEPINLLPDHRRKPLVAIHFGWSGDEEGRRLAGIADNADPLEARLLTLPPDIEDDIREASALQAKRDTYRDEVFLRLKEENTLPTKGETPLSEHWNKIRKLPAQHVSANRMHHLAWLVKSELIEIPEWFETWRKADQRMWVQATSLARRARNRRKKYYEKVAIDLASRYEAILIEMPDLKKSAEKVNEKTGEKTEFAKKARSGRVIAALYVLESAIQWAACKHGSAVLKIKGEKTASVCAFCEGDHLEEKEEHDSQTLYCPDCGSTVDRKLNGAANAWKRAASDLESLVTEYWEETREKQMGKAETKRLKSEKMAEARRLKRQAASQASAGA

SEQ ID NO: 5 - protein, 615 aa, Acidithiobacillus thiooxidans
MSQIKIVPQINGSQLVYKYGVRMNLKVCGDIDDQIRRARAMYNNIIAVMRGIYDEMQTFTMEHAGPEGQALHEKIVAANVAFDAAKADNDEPRMKQIAMERRELWKALSIILKEVRKEHKNTLKERFYSRIGNNSSTETYQCRAEAIVGGLGYATATKVLDNALKAWQMSMVKGKAPRFARGEEKDQDTLTLQFSQAGGVPVEDIFTGKRKDIGIEYPKKGFGPRSYSAFRFRLGAASEESYAEGTVQLHRAIPENARIAMAHLTRKKAGRKYQYELQLLATLAEPINLLPDHRRKPLVAIHFGWSGDEEGRRLAGIADNADPLEARLLTLPPDIEDDIREASALQAKRDTYRDEVFLRLKEENTLPTKGETPLSEHWNKIRKLPAQHVSANRMHHLAWLVKSELIEIPEWFETWRKADQRMWVQATSLARRARNRRKKYYEKVAIDLASRYEAILIEMPDLKKSAEKVNEKTGEKTEFAKKARSGRVIAALYVLESAIQWAACKHGSAVLKIKGEKTASVCAFCEGDHLEEKEEHDSQTLYCPDCGSTVDRKLNGAANAWKRAASDLESLVTEYWEETREKQMGKAETKRLKSEKMAEARRLKRQAASQASAGA

SEQ ID NO: 6 - protein, 617 aa, Rhodanobacter sp.
MKITPASLPQGDVRIYEFGARLDKDCLEAANDQFFKAHQLYNELVACMQGTLRDMQAYLLENAGQEAQSAQARVEALNEALSAAKAANDEDTMKAVASERREVWRTLAALLRDTRKVHKATLQERFLCRIGRKSTCATYQLRCDAVAAGLGWATANATLDAALLAFKSSFVQGRAPRFAKAGESTQDSLTLQFTAAGGVSVSTLLEGRHTEFRVKASGGCGPRRYGTLEFRLGPASSETYAAGTWQYHRAMPDDGAVGLVRLVRRRLGPKFQWAIQFQVRSPLPVNDSVGERKPLVALHAGWAADLTGRRVAGIADGADPGLARVLQLPPEIEAGLQHSGEVESARSVARDNVVATLKAHAWPQDLLDAAEQPTEDATPEATRRSQAAADLLVIRRLPATHVAIRRLHRLAQRLRDTADLPDWFEAWRKEDKLAWQKAAHAAKRARNRRKGFYREVALGLATGYQAIVLQPLDLESAAKKVDDASGERTEFGRKARSGRVVAAIYELEGAIRWAAAKCGTAVLELTGETAGHCAYCGGAVKPVEDDSQRLACTQCGADIDRKRNGAALAWQATEESLPTLVEDFWRETLAARDGAAAKRKEKREKVAEARRASRVVE

SEQ ID NO: 7 - protein, 655 aa, Unknown
  Description of Unknown: activated carbon metagenome sequence
MTMEQAMVGAVYESASAAGEEVMASRNETTQEETDAFSVSFSTVGPAEVMVYEFGCRIAKGDLDHLRDQLWRSRRLFNEVAAQINQTVDEAKCFLSDRAGPVAGEIAVRLGVLDTEWKSAKALDDREALVKIAGERKSLRTRWYGLLHKARREHGTELRERYLSRIGNRVGAATYALRCAAVDDGLDWAMGNEALAAALGAFGKQWPRFKPISFRRFDDPTEVATLQFTAAGGVAVADILADKHSQIGMQLGREQAGRRMYVPFRMKLGSGAQKKAITGTVLYHRPLPAGASVPIARLVGRRIGKDVKHYLQFMVKLKQAEQPGANSKRAPMGVAHLGWYYQPTGRRLAEVASSEDPGLSEQLTLPIEVAELLDRARELDGQRSKLRDGIVGSVVRELPVEGAPEQIAEEVAALRKMRIEHVAPRRLGKLVFIWSRNCADWQRDRLKAMQAWRLEDRMLWQSSAHTARRARNRRRKHYEQLALSLAGKFTNILIDVPDLAQVAKVKDEDTGEHNGLGARARGGRFDAALYELTSAIEKAGARLGCNVGKIKGPTASTCAHCGGTTKMGKTVRDVVCEACGAVEDRAASAAAVAFGWASQNKDAVDEAVAAALDADRAKATRAAERKEKMAIARATSRAARTESDEDSADGSRELK

SEQ ID NO: 8 - protein, 573 aa, Unknown
  Description of Unknown: aquatic-freshwater sequence
MTIKVYKFGLLDPVSGWDQTAIDVLFLRNKLWNNLVAMEHDKRQAYRNLLLDSDTELAALQARLDAIEVEKASLITSKKALRAKARSRQVDTAEIDLEIKKLLEERKALGGQTKDLRERVKIEVKPLAAELDQQRYEKTKQLNKESGLWWCNSMTVIAAYEVGRLRAMREKNELRFHGFDGTGKYSVCRTGGFSLDHVMTGKLSFVSIRTLPIANLDDLSERGQRSRARHHLTMIVLRATTEEGTKIRHEVTWPIILHRPLPDDCLIKQIQVLRKRVGDRFEWTCSITVDTPEELKARLDSPSISVCGIDLGFRQVNNDLRVATLADSSGGLRYYTIGKDWLDSMDYVEAIQSDLSGTANSVWAQLRLILKELDEYPEALRERITDMLKAGAKTPIRAMRAMQKTLSNEPDLMPDALALLDDWKKRIRRRTKEMHDLRDKLINRRKDIYRNIACEIARDYSLVRIANLKLKDMVKLKRNDGTDTKLTDNARKNCNRAALSELTLYIQQACAKNGVALEKIDTTYMTRTCYQCGYLNPANTINLLLSCEGCGAEYDQDDNAAKNYLNATKPGTG

SEQ ID NO: 9 - protein, 614 aa, Unknown
  Description of Unknown: aquatic-freshwater-aquifer sequence
MTNQENFSIKAAKTPSGDVLIYEFGARLDKECAAEVDKQIKQARGLYNNIVALMRDTMDEMRADLVENAGPVARETQAAIDALNLKFAEAKARDDEGAMLLIAQQRRELWAQLSALLKEVRASLKSEHKSRFFSRIGINSSCATYQLRSVAVKEGLGWGTANEILDNVLGAWKKSLAMGKAPRFVSAAEKMQDTLTLQFTAAGGISVVDLLSRSKGDMILTPPSEAGKRKYGSFQFRMGAASSNSYATGTWQYHRPLPEGSSVGVARLIRRRVGKDTKYAIQLQVKIKEGIEQAVRNRKPLATVHFGWAGDVEGRRVAGIADSAEPSSAQVIALPTEIEEMLARSTTIQGERDTERDNIVPVVKQLDPTKFDETLAEEVTALNKLPAQHIAIRRLHRLCRHLGDVDMLPEALAEWRKADRMRWQSETHLARRARNQRKDFYRNIAINLARNYEVIAIEPLDLAKAAIKLDKMTGEKTELSKKARSGRVVAAIYELESAIRWAAVKTGAAVLELTAAKTASVCSICGGHVSDDTENSQILHCDDCGADLDRKQNGAAIAWQMVEPLREDLAVDYHQAKIDAARATKQKMVEKLGKLAEGRLKGREAKAGSAANPE

SEQ ID NO: 10 - protein, 582 aa, Unknown
  Description of Unknown: aquatic-freshwater-freshwater sediment sequence
MINCYKFGCLQPTAGFDQSAIEHLFLRNKLWNTLVALDHEFRQRYRDLMLNSDEKLKSVQDSIDSINQEIEDLVENKMKLRQKERTKNIDSKLLDERINVLKAKRKTLSADSKTERERVKVEIKPQIDLLNTERYEAKKLAYKESGLWWGNYETVVAAYDTASQKAMKSNTELRFKSFDGSGKFAVRFEDGGLTIDELKAGASNLCRIETLNTSAFQNLSQRSIKSKARHSLTMTIYTFNDEKGKKQRKEITVPIIFHREMEEGKIKTIHLQRKRLGNQFTWSASFTLKNDIEPANVADHPATASCGIDLGYRLVKDGLRVATVADSQNNVEYLVLPKSWIDRMDYTETLQSGLSEAMTLMWAKLKAEIAKIPEYPDAVAEIIKNMQKMGDRLPYKGIKRLYRVLKEQDATGSPVAGFNAVLDILKAWDKATYRQELEMVNLKDKLLKQREHIYRNFAAGLTKKYAHIVVEDMGLAELAKTEKSETETNDMPNAVKANRQRASLYSLVEAIRLSAAKVGSYFEKSKAAYSSMTCNVCGHLNPKTQNIHQSCESCNTMYDVDENAARNFLKGEYINEKVLKQG

SEQ ID NO: 11 - protein, 585 aa, Unknown
  Description of Unknown: aquatic-marine sequence
MATRVYKYGLIPIGYPPQAAIDELFRANSLKNTLVALHRESRENWDDARRSASILYSEKMDELDKKNEDITEAFNGLNKARMDEGTKDETGNKRLLAERAIINRLKKEKGDIYAELKPLRKEADKSIDKKALNDAYRQKCNDAVSAKVSGVYRRTAEQIYANFKTAKDKASKDNATLQFHRFDGTGYFQFRCNPKGVSTDGISVDAFMSANFDGYMRCAVQSVDNSKKKPRIRINAVLAGGRTKASKVFQEFDWIYHRPLPADAQIQNGKILRTRVGDKFRYDLVLTIRVPDVEMVQPAKLSGTIGIDVGFRKVGNTLLIGTVMSSDRSQKAVALEVPQMMVSALEHVVALQGELDDAASDLGKAITPLLKANPIDDEHSKYRLWRSLALRPLHVTLSFEQAYKLSLWLKHEPSLFPSEINLKVHTWWRSYSRKYREIHNRRKKQLTHRKHFYRETAAKLVAENKLIVLEDINLTDFAETKSKNTKLSNKARAQRFMASLGEFRDAIKNAAGREGVPVIDVNPAYTSKTCSDCGHLNKELRSEKEWTCPACGVVHDRDENAANNLQKMGQKYLLDVQKAASMVVQ

SEQ ID NO: 12 - protein, 587 aa, Unknown
  Description of Unknown: aquatic-marine sequence
MTTRVYKYGLIPIGYPPQVAIDELFRANNLWNTLVALHRESRENWDDARRSASILYSEKMDELDKKNKDIREAFNGLNQARMDEGTKDETGNKRLQAERAIINRLTKEQKEIYAELNPLRKEADKTVDKKALNDEYRKKCNTAVSAKVSGVYSRTAGELYAYFRTARDKAFKDKTTLRFHRFDGTGYFAFRCRSKAVGVNVDGISVEDFMSQGFMDYMRCAVMSIDESKKKPRILISAVLTGGATKASKVVQEFDWIYHRPLPPEGQIQNGKILRTRVGDKFKYDLVLTVKLPDVEMIQPAALNGTIGIDVGFRKVGNSLLIGTVMFSDSAQKAVALEVPTMVVSALEHVDALRSELDDVASDLGKAITPLLKANPIDEEHDKYRLWRSLALRPLHVTLSFEQAYKLALWLKREPNLFPSEINEKVHTWWRSYSRKYREIHNRRKKQLTHRKHFYRETAAKLIAQNKLIVLEKIDLTDFAETKNKNTKLSNKARSQRFMAALGEFRDAIKNAADREGVPVIDVNAAYTSKTCSECGYLNKELKSEKEWNCPECGVVHDRDENAANNLQKMGQKYLLDAAKTAVVVVK

SEQ ID NO: 13 - protein, 569 aa, Unknown
  Description of Unknown: aquatic-marine sequence
MAIDELFRANNLWNTLVALHRESRENWDDARRSASILYSEKMDELDKKNKDIREAFNGLNQARMDEGTKDETGNKRLQAERAIINRLTKEQKEIYAELNPLRKEADKTVDKKALNDEYRKKCNTAVSAKVSGVYSRTAGELYAYFRTARDKAFKDKTTLRFHRFDGTGYFAFRCRSKAVGVNVDGISVEDFMSQGFMDYMRCAVMSIDESKKKPRILISAVLTGGATKASKVVQEFDWIYHRPLPPEGQIQNGKILRTRVGDKFKYDLVLTVKLPDVEMIQPAALNGTIGIDVGFRKVGNSLLIGTVMFSDSAQKAVALEVPTMVVSALEHVDALRSELDDVASDLGKAITPLLKANPIDEEHDKYRLWRSLALRPLHVTLSFEQAYKLALWLKREPNLFPSEINEKVHTWWRSYSRKYREIHNRRKKQLTHRKHFYRETAAKLIAQNKLIVLEKIDLTDFAETKNKNTKLSNKARSQRFMAALGEFRDAIKNAADREGVPVIDVNAAYTSKTCSECGYLNKELKSEKEWNCPECGVVHDRDENAANNLQKMGQKYLLDAAKTAVVVVK

SEQ ID NO: 14 - protein, 585 aa, Unknown
  Description of Unknown: aquatic-marine-pelagic marine sequence
MATRVYKYGLIPIGYPPKETIDELFKANVLWNNLVALHRKNREDWDDARRAASILYSDKIDELEKKEEDLDAAWKAFQQARMDEGTRDETNNKRLKSERASINRLKAERAEIYKELKPLRKEADKEIDKKQLNDSFRAQVNEALSVNNSGVYRAIADQIYENFKTAKDKSIKENATLRFHRFDGTGYYHFRCRRKGTNVDGISIDDFMSRNFEAYPRCAVQNIDNSKKKPRIRINAVLAGGKSKASKIHQEFDLIYHRPLPIDAQIQNGKILRTRVGDKFKYDLVLTLKIPDKEPISYNNLKGTIGIDIGFRRSVNSLLIGTVMSSDVTEEAYEIIVPPKIVEAFEHVIDLQSELDDAATDLGRIITPLLKAHPLDEDHSKYKMWRSLALRPAHVTLSFEQAYKLAIWLKHEPDTFPEEITKKVHTWWRSYSRKYRELHNRRRNQLTHRKHFYREEAAKIVALNKLIVLEEINLTDFAETKEKNTKLSKKARAQRFMASLSEFRDAIKNAAQRDGIGIIDVNPAYTSKTCSECGNLNKDLRSEKQWSCPACGVVHDRDENAANNLQKMGQSYLENIKKETSEIIE

SEQ ID NO: 15 - protein, 585 aa, Unknown
  Description of Unknown: aquatic-marine-pelagic marine sequence
MATRVYKYGLIPIGYPPKETIDELFKANVLWNNLVALHRKNREDWDDARRAASILYSDKIDELEKKEEDLDAAWKAFQQARMDEGTRDETNNKRLKSERASINRLKAERAEIYKELKPLRKEADKEIDKKQLNDSYRAQVNEAISVRNSGIYNATAGQVLDNFKAARDRSFKENATLKFHRFDGTGYYHFRCRRRGAKVDGINVEDFMSRNFIANPRCAVQSIDNSKKKPRIRINAVLAGGQSKASKVHQEFDLIYHRPLPIDAQIQNGKILRTRVGDKFKYDLVLTLKIPDKEPISYNNLKGTIGIDIGFRRSVNSLLIGTVMSSNVSEKAYEIKVPPKIVEAFEHVIDLKSELDDAATDLGRIITPLMKAHPLDEDHSKYKMWRSLALRPAHVTLSFEQAYKLAIWLKHEPDTFPEEITKKVHTWWRSYSRKYRELHNRRRNQLTHRKHFYREEAAKIVALNKLIVLEEINLTDFAETKEKNTKLSKKARAQRFMASLSEFRDAIKNAAQRDGIGIIDVNPAYTSKTCSECGNLNKDLRSEKQWSCPACGVVHDRDENAANNLQKMGQTYLESLKKETSEVIE

SEQ ID NO: 16 - protein, 586 aa, Unknown
  Description of Unknown: aquatic-marine-pelagic marine sequence
MATRVYKYGLIPIGYPAKETIDELFKANVLWNNLVALHRKNREDWDDARRAASVLYSDKIDDLEKKEEDLDAAWKAFQQARMDEGTRDETNNKRLKSERASINRLDTEKAEIYKELKPLRKEADKEIDKKQLNDAYRTKVNEAVSVRNSGIYSATAGQILENFKTARDRSFKESATTLRFHRFDGTGYYQFRCRRKGTNVDGISIDDFMSRNFEANPRCAVQSIDNRKKKPRIRIDAVLVGGQSKASKIHQEFDLIYHRPLPIDAQIQNGKILRTRVGDKFKYDLVLTLKIPDKEPISYNNLKGTVGIDIGFRRSVNSLLIGTVMSSDVTEKAYEIKVPPKIVEAFEHVIDLQSELDDAATDLGRIITPLLKAHPLDEDHNKYKMWRSLALRPAHVTLSFEQAYKLAIWLKHETDTFPEEITKKVHTWWRSYSRKYRELHNRRRNQLTHRKHFYREEAAKIVALNKLIVLEEINLTDFAETKEKNTKLSKKARAQRFMASLSEFRDAIRNAAQRDGIGIIDVNPAYTSKTCSECGNLNKDLKSEKQWSCPACGVVHDRDENAANNLQKMGQTYLESLKKETSEVIE

SEQ ID NO: 17 - protein, 592 aa, Unknown
  Description of Unknown: aquatic-marine-seawater sequence
MWCEINMATRVYKYGLIPIGYPPKETIDELFKANVLWNNLVALHRKNREDWDDARRAASILYSDKIDELEKKEEDLDAAWKAFQQARMDEGTRDETNNKRLKSGRASINRLDAEKAEIYKELKPLRKEADKEIDKKQLNDAYRTKVNEAVSVRNSGIYSATAGQILENFKTARDRSFKESATTLRFHRFDGTGYYQFRCRRKGTNVDGISIDDFMSRNFEANPRCAVQSIDNSKKKPRIRIDAVLVGGQSKASKIHQEFDLIYHRPLPIDAQIQNGKILRTRVGDKFKYDLVLTLKIPDKEPISYNNLKGTIGIDIGFRRSVNSLLIGTVMSSDVTEKAYEIKVPPKIVEAFVHVIDLQSELDDAATDLGRIITPLLKAHPLDENHSKYKMWRSLALRPAHVTLSFEQAYKLAIWLKHEPDTFPEEITKQVHTWWRSYSRKYRELHNRRRNQLTHRKHFYREEAAKIVALNKLIVLEEINLTDFAETKEKNTKLSKKARAQRFMASLSEFRDAIRNAAQRDGIGIIDVNPAYTSKTCSECGNLNKGLRSEKQWSCPACGVVHDRDENAANNLQKMGQSYLESVKKETSEVIE

SEQ ID NO: 18 - protein, 577 aa, Unknown
  Description of Unknown: aquatic hot springs metagenome sequence
MIKAFKYGMLEPVAGFDKAAIDVLYLRNKLWNSLVELEKAHRERYRTLITGSDDELSKIQARLDQIEAERAELVKRKRQARAMVRSKKVDTSEHDDRIDMLMAERNDLRTKAKDIRLQVKEKVKPAIADLEKERYEAVKHLIHEAGLWWCNSETVIAAYDLARVKAMKENAELRFRSFDGSGKFAVRKTGGFALSDLVSGKLSFARLEALPDANFAHLSERGKRSRARHHLTMTILTYKDESGKLCRHEVTWPIILHRPLPPEGMIKFIHVQRKRIGKDFQWTCSITMEVDEIQKTPIDHPSRAACGIDIGYRLVKDGLRVAVIADTSGKIDHLTLPQDWIEKMDHVESIQGHLDNSNDLAWGELKALLKSMHDYPESIAESIGRLLKAGDRTPVRGMRALHWRLRNEPETMPEVLSILDTWEAETCRREREMHRLRRKLINRRKDLYRNFAYKVANRYVLIRIRGLSLKKLAAVNLEDGSDNQMPQAVRNNRTRASLSELTLCLQQAAVKAGADFEKVFDVNSTTTCSTCGNQNLKMDREDIYFRCEKCDTLHDQDENAAKNLLRKEFYLAEQAVM

SEQ ID NO: 19 - protein, 614 aa, Unknown
  Description of Unknown: arthropoda-digestive system-termite gut sequence
MENHKFTIPDQANQGIIVYEYGIRLDKESKPLVWQQIQLSRKLYNNIVASMRQTFDAMNTFILERAGDEGKQLNQAIEEGIERFKTAKAEQNEDDIKETVLFLREKRAKLSEQLKGVRTQYKEETKRNFFNRIGMRTSCETYQIRSQAVKDGLGWATANEVLNSALKAFQARIKTGQPPKFAVGEEKQQDSLRTQFTQAGGCPVATLFESEHSGLSLRAAAGFGRRKYGTFRFRLGEAKSDVWATGTCQFHREIPSGATVASAALVQRRIGRDLKHALQLVVKLPQQAEAQATQSKKFCTVHFGWASEEGIQYVMALADQENPTKAQLFQLPTDIETDFNRVENLASQRSKLLNDLVLQIKSGSIVIPSQIKEVADEFDAIKRLPATHISLTRLHRICRLMIESDIFRPEALERWRRQDRLLLQDIAHIRRRALYRRRDFYRVTASVIAKSYGAIVIETLDLKKANTKINMVTGEKSDKNKKSRSRQRMAALHELQRQLRQAAGKAGCVIIELTGEKTTATCAFCNREGTTTTSESSQVLHCPHCGSQMNRKQNGAAVAWQLASPIIDDLVHEARSLAAVQSSERAASKILKAEKVATARKANRAAREPAATDK

SEQ ID NO: 20 - protein, 631 aa, Unknown
  Description of Unknown: groundwater metagenome sequence
MIVQITPAPLPQGDVRIYEFGARLDHDCVRTVDEQIFKAHQLYNQLVACMQTTVRDMQAYLLDHAGPDAHAAKARVDGLNEAFNAARAANDENRMTTVATERREAWRALAAVLRIARKEHRTAMQETFLSRIGKKSACETYQLRCKAVADGLGWATANATLDAALIAFKKSFALGRAPRFARIADSIQDTLTLQFTAAGGINIERLLDGKHTELALKPPAVCGKRGYGTFAFRLGAASAETQATGTWQYHRPLPPGGTVGLARLVRRRIGPKTTWSLQLQVRSPLPEREHEDRRPLVTVHPGWAADLSGRRIAGIADAADPGLATVLQLPPDIEHGLQRAAELESTRSQARDALTPMLKVHPWPQELLNAATPEEDASASGDSGPMAPERIMCRKVADEILALRRLPAQHIAIRRLHRLARWLRLAEVDVPDWLETWRKEDKLRWQASAAAAKRARNRRRGFYRETALRLASQYQAIVIEPLNLADAAKKIDEATGERSDFAKKARAGRVVAAIFELDSAIRWAATKCGTAVLDLTGETAQHCAICGGHSLKADDEDSQCLRCSDCGADIDRKRNGAALAWQAAAAHLETHLEDFWRLTLENRASAAAKRDEKKTKLQEGRRAAMRETLET

SEQ ID NO: 21 - protein, 575 aa, Unknown
  Description of Unknown: groundwater metagenome sequence
MIKAYKFGLLNPISGFDQAAMDVLYLRNKLWNQLVELEKNSRAAYRALMLDSSEELSVIQTRIDAIEVERADLVSQKKKLRASVRSKKVDTAGIDAAVERLIAERTNLRAKAKQLREVVKVEIKPKAVELDKVRYAAVLALIKGSGLWWGNSETVIAAYDVARVRAMKESAELRFRSFDGTGKFAYRESGGIDFDKFMSGKVNFARLNTLPDSDFAHLSERGRRSKARHHLTMTVLTSVDDAGKKVRHEVTWPIVMHRDMPAGAIKTIHVHRKRVGDQFNWTCSITIDVPEEPKQLIDHPAKAACGIDLGFRLVKDGLRIATIADSDNRIEHVVLPLDWIEKMDYVEHLQSTLSETANLTWVRLRKHLSELPDYPESIKERIHNILKAGERVPTRGMRSLLGALKAEPELLPEALQILAAWSDDIYRPAREMHNLRDKLMKRRQDLYRNVSHCLSNKYAMVRVEDMDLRQIARVKKDDGSDNPLPDTVRDNRKRAALFEFVLSIKQSCVKTGSVFEKMNPAYSSMTCSSCGHLNQPGMDIHYSCENCGTLHDQDENAAKNFLRGEYFSSPKQDVA

SEQ ID NO: 22 - protein, 579 aa, Unknown
  Description of Unknown: soil metagenome sequence
MKKITIRKYGARLLGDSEPIIVKSMRDQNTLWNKLVEIERANTTEYRDIVAQSDDVLAALTQEYAAAEQRLKDVQEMRNRVRAAKRSKQIEGAENYAAEIKAISSSLKDLRARMKECRARAKEAAKPRLEGLEDRRRAAVKQATNEAAIWWAHSELVTNSFDVARVKALKSNAELRFHRFEGEGRIGVRIQDGILLGNQKGTSMLQVREATPEELGHLQAQRARKRLVAVDIRVGKRGEDGHIPKATFLVTIHEGMELLPNTPLKTVTVKREMHAGQPKWFMVFMFVESDAEPEDKPLPPKAVGVDFGWRVVKDREWGERTGLRVATIANKDGTKQHITLPPELLARFERSTRLRSELDVAANEFWVRTASLFTDDILATLSEDEWLRVLVGKAKRAHRPYPSLMEAITRAHAANPVLGPEADEQMQAWARRARRLNVAAFGARRKAADHRKHLYRNVAARLVRECGLIAIKDTDFHKLAKLVDDDGKETELNKHARANRFMASPSELRQAIKMAALREQRELVNVAPAHTTTTCSACGHVHGERPKDLIFVCDSCGKWHDQDENSAAICLKIALESKL

SEQ ID NO: 23 - protein, 621 aa, Unknown
  Description of Unknown: terrestrial-soil-pond soil sequence
MNDVTLSFRGLEPRESTSWSYGARVAGSEALEEQYTLAQRTYNNMVEVTRQALAAFNEWFAEKDPEIARLGTEIERLGAQWAEAKARDDRDELARIAAERRPLRQQWYERCFAVRKDNRGEVNALLKQWVGSAKESRLYLARVEAVKAGLYWATATAVMTAVQRAWDKQFPRLRPVAFSRRSEKRRETLVVQFTESGGVAMETLHTKHGGLWIEPPGEGLLSAWANGRRPGRPDRYLRFRMRIGGRGREGVYVEGSVQMVRPVPEGARVMMARLVRERVATRYRYQLQLVLRLAEPLSIPAEDKAPRVALDIGWYYEAGRGRRVIAYTAGANEDAVEQIYLDPSIDEAFDRVDDMNSRRSLARDDVTIALRCCQWDGAPEALAEALSAINRLPVAHVSPARLAQMVWLWREHHGDYRPDVLEELWAWRRWDKKLYETSAHLRRRTAGRRKKFYEGWARHFASRYATIVVVRPDLREAAMVKNAISGEHTALTARARQGRVRAALYEFLNVVATKAAEAGSVVIELTGRTTTECSACGEIMVVPEDNPATRLLVCHACGVSHDREANSAVLAFRVLDDEASVTKGLAHAQEKADKARERRYKRRTAMRDARWKDEQTTTSGQ

SEQ ID NO: 24 - protein, 632 aa, Unknown
  Description of Unknown: terrestrial-soil-pond soil sequence
MNQSPPANGECMENVTLSFRGLEPRESTSWNYGARVEASEALEEQFTLAHRTYNQMVEVTRHALAALTDWFCEKDPEIARLGAAIERLSAQWSEAKARDARDELEQIAAERRFLRKDWYERCFAVRKDNRSEVNALIRQWVGLTKESRLYAVRTEAVKAGLYWASATAVMTAVQQAWDKQFPRLRPVAFSKRAEKTRETLVVQFTEAGGVPMSTLHSKHGGLWIEPPGDGLLTAWANGRRPARPDRYLRFRMRIGGRGREGVYVEGSVQMVRPVPEGARVMMARLVRERVATKYRHQLQLVLRLAEPLSIPTETKEPRVALDLGWYYEAGLGRRVIAYTGGDNEDAVEQIYLPPGIDEAFDRVDDMNSRRSLARDDVAITLRCCQWDDAPAPLAETLAAINKAPVAHVAQARLARLVWQWRNEHSDYRPDVLAELWSWRRWDKKLYEASAHLRRRTAGQRKKFYEHWARYFASRYTTIVVVRPALREAAVIKNEASGEHTALTARARQGRVRAALYDFLNAVATKAAETGSVVIEVSGRTTTECSACGAIMAVPEENPATRTLVCHACGVSHDREANSAVLAYRVPDDDGAVTQSLEHAQEQADRARERRERRRQAMREGRWKGKQSAGGGD

SEQ ID NO: 25 - protein, 621 aa, Unknown
  Description of Unknown: terrestrial-soil-pond soil sequence
MENVTLSFRGLEPRESTSWNYGARVEASEALEEQFTLAHRTYNQMVEVTRHALAALTDWFCEKDPEIARLGAAIERLSAQWSEAKARDARDELEQIAAERRFLRKDWYERCFAVRKDNRSEVNALIRQWVGLTKESRLYAVRTEAVKAGLYWASATAVMTAVQQAWDKQFPRLRPVAFSKRAEKTRETLVVQFTEAGGVPMSTLHSKHGGLWIEPPGDGLLTAWANGRRPARPDRYLRFRMRIGGRGREGVYVEGSVQMVRPVPEGARVMMARLVRERVATKYRHQLQLVLRLAEPLSIPTETKEPRVALDLGWYYEAGLGRRVIAYTGGDNEDAVEQIYLPPGIDEAFDRVDDMNSRRSLARDDVAITLRCCQWDDAPAPLAETLAAINKAPVAHVAQARLARLVWQWRNEHSDYRPDVLAELWSWRRWDKKLYEASAHLRRRTAGQRKKFYEHWARYFASRYTTIVVVRPALREAAVIKNEASGEHTALTARARQGRVRAALYDFLNAVATKAAETGSVVIEVSGRTTTECSACGAIMAVPEENPATRTLVCHACGVSHDREANSAVLAYRVPDDDGAVTQSLEHAQEQADRARERRERRRQAMREGRWKGKQSAGGGD

SEQ ID NO: 26 - protein, 612 aa, Unknown
  Description of Unknown: wastewater metagenome sequence
MKSTPDTISITPGATANGDMLTYEYGLRLDKESIAHVGAQIAMSRRLYNDLVAQIRTTVDALQAFVIDKAGDEAVQIKVRIEELTTNFKAAKAEDNEPEMKRIAEDRRNQWKLLSALIKAASKANRAEINERFLSKIGKNSSCPTYQLRGKAVAEGLGWGTANAVLDAALQAFKTSFALGRAPRFASGAEIDQDCLFLQFTAAGGVASASLLAGKQADLQLLPTNGCGKRKYGEFKFRLGAAKADTYATGTWQYHRPLPDGSNIALARLVRRRIGMHDKWAIQLLVKPKTPIRESVEERKPLVAVHFGWAADIAGRRVAAIADAADPGAATILALPPSIEEALDRAREIQGVRDKSRDEIAPQVRSIEIPGSANETLIDLLGRVRKTRPQDISANRIHYLCRLLREADHLPDWLEAWRKEDKNRWQDQAHIAKRARNARKSFYREVAINLGRQYDAIAIEPLDLASAAMKVNEATGEKTDFAKKARAGRVVAALYEFESAIRWAATKTAAALIEVSGATASVCSVCGGHVEATKDDHQSIVCHDCGAVLDRKQNGAAIAWQSANDKREDVVTEFWSEYFADSEAKKEKKAEKLAKMAEGRRNARTESAAEIA

SEQ ID NO: 27 - DNA, 37 bp, Artificial Sequence
  Description of Artificial Sequence: Synthetic oligonucleotide
gtttcatcggccatcgcggcggcctcgtagctgcgac

SEQ ID NO: 28 - DNA, 27 bp, Artificial Sequence
  Description of Artificial Sequence: Synthetic oligonucleotide
gtttcatcagccattgcaggggctttg

SEQ ID NO: 29 - DNA, 36 bp, Artificial Sequence
  Description of Artificial Sequence: Synthetic oligonucleotide
gtgttatgcccatctcagcgggctggttgctgagac

SEQ ID NO: 30 - DNA, 25 bp, Artificial Sequence
  Description of Artificial Sequence: Synthetic oligonucleotide
gttatagtggccattgtaggggctt

SEQ ID NO: 31 - DNA, 36 bp, Artificial Sequence
  Description of Artificial Sequence: Synthetic oligonucleotide
ggtttaaggcgatcacggccgcctagttgccgcgac

SEQ ID NO: 32 - DNA, 37 bp, Artificial Sequence
  Description of Artificial Sequence: Synthetic oligonucleotide
ggtgctcaagccatcgcagcggcatcgttgctgcgac

SEQ ID NO: 33 - DNA, 29 bp, Artificial Sequence
  Description of Artificial Sequence: Synthetic oligonucleotide
gagcggttaacagggtgtcgatatagatt

SEQ ID NO: 34 - DNA, 37 bp, Artificial Sequence
  Description of Artificial Sequence: Synthetic oligonucleotide
gtaacaacagccattaccctggcttagtaagggtgac

SEQ ID NO: 35 - DNA, 34 bp, Artificial Sequence
  Description of Artificial Sequence: Synthetic oligonucleotide
agtagaaccctgtcgcttgggcggtaaagcgaac

SEQ ID NO: 36 - DNA, 36 bp, Artificial Sequence
  Description of Artificial Sequence: Synthetic oligonucleotide
gattaaggcccctgtgcattggggtgtaaatgcaac

SEQ ID NO: 37 - DNA, 36 bp, Artificial Sequence
  Description of Artificial Sequence: Synthetic oligonucleotide
gtctaaggcccctgtgcattggggtgtaaatgcaac

SEQ ID NO: 38 - DNA, 36 bp, Artificial Sequence
  Description of Artificial Sequence: Synthetic oligonucleotide
ctttaaggaccctgtacgttggggtgtaaacgtaac

SEQ ID NO: 39 - DNA, 26 bp, Artificial Sequence
  Description of Artificial Sequence: Synthetic oligonucleotide
ggtatcatgaccctacgggtgggggg

SEQ ID NO: 40 - DNA, 29 bp, Artificial Sequence
  Description of Artificial Sequence: Synthetic oligonucleotide
agccatcgcaggggcttggtgcttgcgac

SEQ ID NO: 41 - DNA, 36 bp, Artificial Sequence
  Description of Artificial Sequence: Synthetic oligonucleotide
attccaaggcgatcacagccgcctagtagttgtgac

SEQ ID NO: 42 - DNA, 37 bp, Artificial Sequence
  Description of Artificial Sequence: Synthetic oligonucleotide
gttttagaaccctgttgagtgggcataaactcaaact

SEQ ID NO: 43 - DNA, 26 bp, Artificial Sequence
  Description of Artificial Sequence: Synthetic oligonucleotide
ggtatcatgaccctacggatgggggg

SEQ ID NO: 44 - DNA, 36 bp, Artificial Sequence
  Description of Artificial Sequence: Synthetic oligonucleotide
gattcatagccctgtcggttgggcggtaaaccgaac

SEQ ID NO: 45 - DNA, 37 bp, Artificial Sequence
  Description of Artificial Sequence: Synthetic oligonucleotide
gtctcaatagcgatcggcgccgcttagtagggtcgac

SEQ ID NO: 46 - DNA, 38 bp, Artificial Sequence
  Description of Artificial Sequence: Synthetic oligonucleotide
ggtaacaatagcgatcggcgccgcttggtagtgtcgac

SEQ ID NO: 47 - DNA, 37 bp, Artificial Sequence
  Description of Artificial Sequence: Synthetic oligonucleotide
atctcaatggccatcgtcggggctttgtaccggcgac

SEQ ID NO: 48 - protein, 567 aa, Clostridiales bacterium
METAATKNYLALSFGCLSPTRGEEYLLDQIKKKHDLWNKLVEKDREHREKVRQVMVFESETTKKIKELEEELNSLREEIKNQRKTKRTGKVDLTDQKARIEEIKPQLKQLKEKFKEERSFIFEARKQELAQLEKERWAVVKELGKGSGLYWCNLEDVVNSYDIGRKKAKAAGGEMRFHRWDGTGKVTVRFQKGLPVNEMFSCTNNLLQIDPVDKDAWYNPVRAIRRKKSRTRVRLRACSENKKPLFIELPVVLHREIPEDALIRTASVIREKVGMRYRYKLNLVLEILGENTNRILPALEGTAAIDLGWRTVKDGLRVACLVDDKGHSEELILDNDVLHEFNKIKDLQSIRDNLFNETKAKLMELLKTLELPDEAKERTSHMANWRSQQKMLRLHQYWRENRLPGDDEVWEVLEYWRKREIHLYEWQENLRDQVLRRRKEIYRIFAAKITRKYKTIVLEEFTLNKTVQKPNPEEGPAGTLPANRNRFIAAISEFRNELANACRKNHVEFTYVPAENTTITCHKCGHKEKFDAAAQIIHTCSTCGELWDQDYNAAKNLLAFSQKGGVK

SEQ ID NO: 49 - protein, 594 aa, Clostridiales bacterium
MSRLEARTRYLQAGQKRLGKIRKRGFFMETAATKNYLALSFGCLSPTRGEEYLLDQIKKKHDLWNKLVEKDREHREKVRQVMVFESETTKKIKELEEELNSLREEIKNQRKTKRTGKVDLTDQKARIEEIKPQLKQLKEKFKEERSFIFEARKQELAQLEKERWAVVKELGKGSGLYWCNLEDVVNSYDIGRKKAKAAGGEMRFHRWDGTGKVTVRFQKGLPVNEMFSCTNNLLQIDPVDKDAWYNPVRAIRRKKSRTRVRLRACSENKKPLFIELPVVLHREIPEDALIRTASVIREKVGMRYRYKLNLVLEILGENTNRILPALEGTAAIDLGWRTVKDGLRVACLVDDKGHSEELILDNDVLHEFNKIKDLQSIRDNLFNETKAKLMELLKTLELPDEAKERTSHMANWRSQQKMLRLHQYWRENRLPGDDEVWEVLEYWRKREIHLYEWQENLRDQVLRRRKEIYRIFAAKITRKYKTIVLEEFTLNKTVQKPNPEEGPAGTLPANRNRFIAAISEFRNELANACRKNHVEFTYVPAENTTITCHKCGHKEKFDAAAQIIHTCSTCGELWDQDYNAAKNLLAFSQKGGVK

SEQ ID NO: 50 - protein, 607 aa, Gordonia otitidis
MTRVTVQTAGVHYKWQMPDQLTQQLRLAHDLREDLVTLEYEYEDAVKAVWSSYPAVAALEAQVAELDERASELASTVKEEKSRQRTKRPSHPAVAQLAETRAQLKAAKASRREAIASVRDEATERLRTISDERYAAQKQLYRDYCTDGLLYWATFNAVLDHHKTAVKRIAAHRKQGRAAQLRHHRWDGTGTISVQLQRQATDPARTPAIIADADTGKWRSSLIVPWVNPDVWDTMDRASRRKAGRVVIRMRCGSSRNPDGTKTSEWIDVPVQQHRMLPADADITAAQLTVRREGADLRATIGITAKIPDQGEVDEGPTIAVHLGWRSSDHGTVVATWRSTEPLDIPETLRGVITTQSAERTVGSIVVPHRIEQRVHHHATVASHRDLAVDSIRDTLVAWLTEHGPQPHPYDGDPITAASVQRWKAPRRFAWLALQWRDTPPPEGADIAETLEAWRRADKKLWLESEHGRGRALRHRTDLHRQVAAYFAGVAGRIVVDDSDIAQIAGTAKHSELLTDVDRQIARRRAIAAPGMLRAAIVAAATRDEVPTTTVSHTGLSRVHAACGHENPADDRYLMQPVLCDGCGRTYDTDLSATILMLQRASAATSN

SEQ ID NO: 51 - protein, 591 aa, Gordonia otitidis
MPDQLTQQLRLAHDLREDLVTLEYEYEDAVKAVWSSYPAVAALEAQVAELDERASELASTVKEEKSRQRTKRPSHPAVAQLAETRAQLKAAKASRREAIASVRDEATERLRTISDERYAAQKQLYRDYCTDGLLYWATFNAVLDHHKTAVKRIAAHRKQGRAAQLRHHRWDGTGTISVQLQRQATDPARTPAIIADADTGKWRSSLIVPWVNPDVWDTMDRASRRKAGRVVIRMRCGSSRNPDGTKTSEWIDVPVQQHRMLPADADITAAQLTVRREGADLRATIGITAKIPDQGEVDEGPTIAVHLGWRSSDHGTVVATWRSTEPLDIPETLRGVITTQSAERTVGSIVVPHRIEQRVHHHATVASHRDLAVDSIRDTLVAWLTEHGPQPHPYDGDPITAASVQRWKAPRRFAWLALQWRDTPPPEGADIAETLEAWRRADKKLWLESEHGRGRALRHRTDLHRQVAAYFAGVAGRIVVDDSDIAQIAGTAKHSELLTDVDRQIARRRAIAAPGMLRAAIVAAATRDEVPTTTVSHTGLSRVHAACGHENPADDRYLMQPVLCDGCGRTYDTDLSATILMLQRASAATSN

SEQ ID NO: 52 - protein, 597 aa, Gordonia otitidis
MHYKWQMPDQLTQQLRLAHDLREDLVTLEYEYEDAVKAVWSSYPAVAALEAQVAELDERASELASTVKEEKSRQRTKRPSHPAVAQLAETRAQLKAAKASRREAIASVRDEATERLRTISDERYAAQKQLYRDYCTDGLLYWATFNAVLDHHKTAVKRIAAHRKQGRAAQLRHHRWDGTGTISVQLQRQATDPARTPAIIADADTGKWRSSLIVPWVNPDVWDTMDRASRRKAGRVVIRMRCGSSRNPDGTKTSEWIDVPVQQHRMLPADADITAAQLTVRREGADLRATIGITAKIPDQGEVDEGPTIAVHLGWRSSDHGTVVATWRSTEPLDIPETLRGVITTQSAERTVGSIVVPHRIEQRVHHHATVASHRDLAVDSIRDTLVAWLTEHGPQPHPYDGDPITAASVQRWKAPRRFAWLALQWRDTPPPEGADIAETLEAWRRADKKLWLESEHGRGRALRHRTDLHRQVAAYFAGVAGRIVVDDSDIAQIAGTAKHSELLTDVDRQIARRRAIAAPGMLRAAIVAAATRDEVPTTTVSHTGLSRVHAACGHENPADDRYLMQPVLCDGCGRTYDTDLSATILMLQRASAATSN

SEQ ID NO: 53 - protein, 536 aa, Meiothermus silvanus
MPFGKKARHVKAYQFGADAPQEGMEAVLEQHRLRTDYYNALVEMELRQREERTALLANLAAESGLESPNQVYERLKAAGEKGIRKHPEYVAARERQKALYGHPRLLELQSRQREERNALRRSFGAKGLYSSNYLDVERAFDKARQSPELRFRRYSPHEGRLAVLYTEGLPMREIGSDTRVQLPLPDPIIYRDRATRRKHQRVLMKFRVRSVERQPLWITVPVYLHRELPDGVCREVSLHWHRVADRLRWTVSVVVEVEGPPVASPTGRGAVAVDLGWRRVEGGLRAGFWVGEDGAGGEIALSEGDLKQFSKVEDLRSIRDQHLNALKEALAAWLEAPPAPLPDWLAEETKTLPQWRSPARFAALFRRWQSERVHADEAAYGLLEGWHKRDRHLWQYEANLREQMILRRREQYRVLAATLARQYDALIVEDFNLRAAAELDQGGSDLPDAARRYRTIASPSTLRDALVNAFAQRGKPVRKLNPAHTTTDCHACGGALVGDPAKELRLYCPTCERFYDQDENAARNLLRRAQEVQAQV

SEQ ID NO: 54 - protein, 589 aa, Methylomonas koyamae
MIRTYKYSLKAPENFAEDCEDELRRMNDLWNRLIEIDRQRERSFKDLCRSTSAEYAAAQDEIEALREPIDNLYDAIRAERIATRSKEPSDELRARRDELLGRRKALWEICKAIQKAIPKESQAPINEVYKTNVKLARQQSGCFWGNYNAVIESFETAKSKAIKDGGRLHFKSFDGSGRFVNQIQGGMTVTELLAGSHSQAQLTNLVTTNKTKGRFAFTAFTGKDDAGKRFRRQLFSEINYHRPIPADGVIKAVEVVKVPHDGKQKYKWHACFTVALPEVDIKHPKRNIAGVNLGWRQFGGRLRVAVVVDDAGKKTEYFVPAELVSKFEAAETIQKAADDARNEMLSWLRTFYQDNRDEAPQEWRESIQGLLRNRPSVDAANHLMTIWRECVFAQEESRRYAAWLKSDAALRRSYTGCRQNAVKWREEIYRHIAKELAERYAVLAVTDTPLSTMSRTKAKDDLAVDNALPESARRNRVIAAIYSLKEWIGKQAAKTGSTVETITGKMTATCHKCGYVAEKRLRGSQYATCKSCGSELELDENAAINCRNHASGAVLISDKPEKTGRFQRAKMAENDFARKIGDNASPLVT

SEQ ID NO: 55 - protein, 603 aa, Mycobacterium conceptionense
MAITVHTAGVHYRWTDNPPEQLMRQLRLAHDLREDLVTLQLDYETAKAGIWSSYPAVAAAETELADAESAAEQAAAAVSEERTKLRTKRITGPLAQKLTAARKRVREARSTRRAAISEVHEEAKGRLVDASDALKAQQKALYKTYCQDGDLFWATFNDVLDHHKAAVKRIGQMRAAGQPAQLRHHRFDGTGSIAVQLQRQAGQPQRTPELIADVDGKYGRVLSVPWVQPDRWERIPRRERRMIGRVTVRMRAGQLSGEPQWLDIPVQQHRMLPLDADITGARLTVTRTAGTLRAQISVTAKIPDPEPVTDGPDVAVHLGWRNTDTGVRVARWRSTEPIEVPFDFRDTLTVDPGGRSGEIFVPEAVPRRVERAHLIASHRADRMNELRARLVDYLAETGPRPHPSREGEELGAGNVRMWKSPNRFAWLARVWADDESVSTDIREALAQWRHQDWISWHHQEGGRRRSAAQRLDVYRQVAAVLVSQAGRLVLDDTSYADIAQRSATTKTEELPNETAARINRRRAHAAPGELRQTLVAAADRDAVPVDTVSHTGVSVVHAKCGHENPSDGRFMSVVVACDGCGEKYDQDESALTHMLTRAVQSAA

SEQ ID NO: 56 - protein, 596 aa, Mycobacterium mucogenicum
MTTMTVHTMGVHYKWQIPEVLRQQLWLAHNLREDLVSLQLAYDDDLKAIWSSYPDVAQAEDTMAAAEADAVALSERVKQARIEARSKKISTELTQQLRDAKKRLKDARQARRDAIAVVKDDAAERRKARSDQLAADQKALYGQYCRDGDLYWASFNTVLDHHKTAVKRIAAQRASGKPATLRHHRFDGSGTIAVQLQRQAGAPPRTPMVLADEAGKYRNVLHIPGWTDPDVWEQMTRSQCRQSGRVTVRMRCGSTDGQPQWIDLPVQVHRWLPADADITGAELVVTRVAGIYRAKLCVTARIGDTEPVTSGPTVALHLGWRSTEEGTAVATWRSDAPLDIPFGLRTVMRVDAAGTSGIIVVPATIERRLTRTENIASSRSLALDALRDKVVGWLSDNDAPTYRDAPLEAATVKQWKSPQRFASLAHAWKDNGTEISDILWAWFSLDRKQWAQQENGRRKALGHRDDLYRQIAAVISDQAGHVLVDDTSVAELSARAMERTELPTEVQQKIDRRRDHAAPGGLRASVVAAMTRDGVPVTIVAAADFTRTHSRCGHVNPADDRYLSNPVRCDGCGAMYDQDRSFVTLMLRAATAPSNP

SEQ ID NO: 57 - protein, 664 aa, Pelobacter propionicus
MKRVTITIDGEQTKGIVIGTIAANHTAAEWLLTASVSAKSAKVRFDPEEAVAETSSLVMIAPTRTEKYLYLVPDEQVQPVTTIVRKYGLLSPLDWDCPDYPAGDAFEHLFLQNKLWNDLVTIEREHRAKYRELIGSDEETAQMDTEIASIKDRLSVLDEGRKKLRVEHRKKKCPEIDCLDENIKKLKSELKAVASKAKETRAAAKDRIRAAGNDIENLEKDRQAAVIKAYNNSGLWWGNYNAVLESYKKARIKALKDGAELKYHRFDGSGRFTNQIQGGMSVQDLLEGNRNVASLRLVSSGELGDISGKKPPSLDLQSVGSRRDSREYGILAITLYTGTDEQSKKFRRTLSFPVILHRPLPEGATLKSLSVHRKRVGTDFVWSVVFTFTTDCPTYDQRSSTGNRCGLNLGWKKQAGGGLRVATIYDGSDARHITLPQAIIDGLDYVNGDLQGRIDSAANENHAWLLEQWGGDELPESLQELRSMLRRSKRPHPAKFAKAVIAWRNYPEYLGDARDEAEQRRKATKRLTIEMAHKREKLLRRRMDFYRNTAKQLTSVYDVICLDKMDLRRLALLEKGDGTPNELTKIARKQRQQAAISELRECLSKAAAKNGTQIEQVSTASSATCSACKGKMEQVDGIMWRCRECRALVDQDINAAANLFREVL

SEQ ID NO: 58 - protein, 599 aa, Thioalkalivibrio thiocyanodenitrificans
MKRQQEDTEALVYAYGARIPLDDPHLQEELRKQRAFWDALVEATLAAERELDDRMKADSPQYAAAVQALIDASQAVREAIERRNAERAKTRSRTTSVDGEVKERITEKNAARKEVWRLAGEWRKANKEAVSEHQARMKEEAKRLRQGCGLYWGNYNRVLDSFQRARQQTLKKGRRVRPSDPARDDGILAVQIQRTKSGLGASPEELFSGNVSQLQIDRPPPGVEFLPANRRRREARVTARMRVDAAGHMIEFPVVLHRPVPPGARIKAAQLVWKREGERWRGQLCLTVSSPKQEREHPGVEACGIDLGWRLQKDGALRVATVADSKSRLYTYTLPADWMRGMDQVERLSSHLDENAMEVAAWVHAHRDELPEKLTQPAANWSPGKGSKWLRDKELHDAVRALNWEVPAEIRHWYERYRHLKTWRDNLRAKLLRSRREVYRLLAADLAGRYAVIGIEDMDLSKIAKTKKRKDASDPELHATARAQRQRAAVHALRHEIEHQANKHGAQLVHVSGKTTTTCRACGAATGQKDRASLIWTCEHCGAVWDQDLNAAGNILDSAMGASAPAATTLAKAKSRRYDLTQPNFRERSKTGSRASARA

SEQ ID NO: 59 - protein, 636 aa, Unknown
  Description of Unknown: algae-green algae-macroalgal surface-ecklonia radiata 2 sequence
MPVINWVYRSEEPTNVAAVKNQILLNHRYRNQLIELEHNRRATYKTLAASLCPAYADAVTIYDRAVAELDEAYKDLRLSRQRARRRHEPTDSQKARINQAKAVRKTAIAQLDAAYKVAKKLIRDAHKVYQDQAAQEITQLADETESQLKRQRKVRYFELVEEAGLDDGQIAHAREAKIARQQSGVYWGTSRIMEQIAEKTYKKGPPPKFRRWEGSGAIGVRFQGGKPVAAVMENNSEILHIHIPPGSERLVIGQDRGEVAKGTIRFLVCRDDDGNPVFATFPYVHHRDFPASAKIIDGFAHLKRVGKKEYWEIRLTIKVDDVVSTVDKSNTCVLHLGHRMIDEQLRCATVMDATQQVSQLFLSSDKLRRFSRPDSLQGIRADRFNIIRGEFLDWLASIDVPEWLVERTQTLASHQSPESLYRTVELWRDNRFVMDTETSAQFFTNSLPWAESKLNSPAVRRKRHPSDIQTVFGIMEFWRSWDRHILQESASINKKAIRNRKHVYRDWLRRLSGRYTHLIVDSTNWATLGKKEKDDEKVVLVANQRRLARIASPGLLRQCAVEIFGQSNVSVVTSVNMTRTCSTCGQVTEDWDSAKLEYHCSHCTYTVDQDINAANIMLSRIPDAVPYTEFAEAKRR

SEQ ID NO: 60 - protein, 592 aa, Unknown
  Description of Unknown: anaerobic digester metagenome sequence
MITVFKYGVHYRWQVPEVLREQLWLGHQLREDLVTLQLEYEAGLKAIWSSYPDVAAAEESLATAAAEALEAAEEVSRQRQVQRTKRITGPAADALAAARKRAKEARVVRRSAIAAVKDEAAERISALAAGLRASQKAKYAEYAQGKGLYWATFGDVLDHHKTAVKMVAAKRAAGRPAALRHHRFDGTGAVAVQLQRPAGKPQRTPALISDPVASNWRNVLHLPWVDPEQWEQMTRAEQRAQGRVIVRMRCGADIIEVPVQVHRMLPADADITGARLVVAREGSDYRISLTVTARIGDPEPVTAGPTVALHFGWRGSDAGPVVVRWQSDAPVDIPNDCSAFMVGDRWGGKIVMPSVIVDRLESAAAIQAGRDEQLNTVRAAVVEWLTVNGPVPHPIRDGEEISSADASRWRRPARFAALAGWWRDAPPAGGEQIAEVLEAWRASDKRLWNTQVHTAGRALRRRDDLYRQVAAIFADQAGLVVVDDTDMGAVAASRSDAPTAVTDPAARRRTYAAPGVLRASIVAAAAREGVPVRSVSHKGMSVIHAECGTVNECDDRFLSALIKCEGCGKVYNQDVNALEVVMREGRRHTSVA

SEQ ID NO: 61 - protein, 696 aa, Unknown
  Description of Unknown: aquatic-freshwater sequence
MGSRVFQFGCPFGPSAGLDETIEQMRLGRAYYNARQEVSRQVRNQTRSIYASCGSVSDLERAVEEAKERKDALELEIKTARAETRTRWTKKSSAQDLKEARTVLKDARAELGAFRSRLREDPIVAAKLATITGGRPKRKDGEASRRHDNTVKNNGTKALAMRALRAEYGPRGKGLGSGTYLLVEAAQGVSEADTPLYDREGQPQDPGFRCWSMGSKHVAVHVQGFELTGATIFQPNDWAWIKPVDPRAWLKETPRGERKRLSRTMLHLRLKTGEDREPVWAVVPIIVHREIPLTAKVTWIVLSMCQQGPRAVWTCEITVNEEAPQSVPEGRGTAAVVFGWRNVSGGILAATWLNTDGVAGQLVLGDGDLDTTDADGGKGGIISGLTRVDSLKETRDKNLNAALASLVSWLRDHDMPEWMRLRTVKRQYDENHQEVQRVLPSKAQALAYLAGWKAQGKLAALCLAWRENRFSGDDDAFRALESWRYHDNHLWRWQAAQNESAHLRRRERYRIVGIELAKHARVLLDGTDFARIAFRPKTEDDKGYVQGPATNRTLVAPSELRDTVKQAAAKMLRDAVKVESANTAITCPRCGNVSKVQRFDDGDFKHSFCCVECGLTGDQDSIRCMNMLVADGHKDAVLEILRRQEEALRYQRRLSNGGDYGEDASNRSENAGVQGAAREVQCDRRRGVLLPHDVGG

SEQ ID NO: 62 - protein, 670 aa, Unknown
  Description of Unknown: aquatic-freshwater sequence
MVTKRLAYGLLEPTENLETVEDQMSKAHKYYNKLVEIENSIRPLRRESYNNGVKRLSPEYEGLEQQLLALQASKDTIENEIKQQRVLNRSKKLDSSNHKQTLAGIKLQIKLVYEKQKEERAKFKGKLKRPSKEKVEPEPHKRPSKEKVEPEPHKRPSKEKVEPEPQWLAEQEEIDEKRNKLISEARKASGLYWGTYLSTEDAFKNACKATPPHKNLHFQRWTGEGKIRVCRNSEPTVSNSLFFIDPLPGDSWEKKKDKGVPSPRGEGKRSRMKTQLHLLVNSNRQKKIAPVWATFPMMLSRPLPDNGRIDSVEVIRKRCGPNWKWAAQVTCTFEETNKPPKGKAIVALDLGWRKIDGNIRVAAFGAIDDAPISLPSESCPDLQQAVVKVGNGYELQLTPEVISGIRKSEELRSIRDSEFNDIRSILTRWLQENDVPEEIRTLKKRGKLNVMSQLQFIHWINSLRSQAQLASLIYRWKDNRFEGYEEILEALENWRYADQHLWEWESEQRRGAIARRNNLFKNFASWLRSIATMVVIEGDFKITDVAERKGLIEDTNRNEIAQSNRQLAGTSILRICIKNKLGNDCIGVPAKNTSKECHVCGEVVEFADPAALEQECHNHHQWDRDHNAWKVLLKRYASGDVIVKTLGTARKGKKKRNSKKLATGEQKIVG

SEQ ID NO: 63 - protein, 655 aa, Unknown
  Description of Unknown: aquatic-freshwater sequence
MGSRVFQFGCPFGPSAGLDETIEQMRLGRAYYNARQEVSRQVRNQTRSIYASCGSVSDLERAVEEAKERKDALELEIKTARAETRTRWTKKSSAQDLKEARTVLKDARAELGAFRSRLREDPIVAAKLATITGGRPKRKDGEASRRHDNTVKNNGTKALAMRALRAEYGPRGKGLGSGTYLLVEAAQGVSEADTPLYDREGQPQDPGFRCWSMGSKHVAVHVQGFELTGATIFQPNDWAWIKPVDPRAWLKETPRGERKRLSRTMLHLRLKTGEDREPVWAVVPIIVHREIPLTAKVTWIVLSMCQQGPRAVWTCEITVNEEAPQSVPEGRGTAAVVFGWRNVSGGILAATWLNTDGVAGQLVLGDGDLDTTDADGGKGGIISGLTRVDSLKETRDKNLNAALASLVSWLRDHDMPEWMRLRTVKRQYDENHQEVQRVLPSKAQALAYLAGWKAQGKLAALCLAWRENRFSGDDDAFRALESWRYHDNHLWRWQAAQNESAHLRRRERYRIVGIELAKHARVLLDGTDFARIAFRPKTEDDKGYVQGPATNRTLVAPSELRDTVKQAAAKMLRDAVKVESANTAITCPRCGNVSKVQRFDDGDFKHSFCCVECGLTGDQDSIRCMNMLVADGHKDAVLEILRRQEEALRYQPAAE

SEQ ID NO: 64 - protein, 601 aa, Unknown
  Description of Unknown: aquatic-freshwater-anoxic lake water sequence
MLDQLRLASVYRNKLVEIELARRAATDDTLRELCPGLLECEAELADVNAKIAEAIAEHKAKNAKARCLTDDKEIKAALTQLKCIRKELATTRKRLRDDGFSPLTEADLSLVPGLAEATKIHAAAENPHAKAKAAAVMHECRSSWLNDPSRPTPIRRLAIQIQLAEIGYAANEAQKTARKTSGLAPGSYLLVDQAADAFRKGAPPVFRGYQGEGRVGVQIVGGMNSEEANSGRDTRLRIVHTPQAEQRVAKNGRVLPAPGAKRQAQQYTLWLRIGSDGRTPTWATWPLILHRPIPETTRIMWAIVQRRIVGGHERWQLTLNLRDDTNAAFARRDVTASGVCGVDIGYRYIDDRAQRVAYWHGSDGASGELQLPSGKVAQWKKVDDLQSIRDGLHNEARAALRDWLATNAHPEWLDEATEHMHAWRRLSRLDRLVAQWRGQRFDGDAEIMATLESWRTRERHLWQYQEQMRDQLLAWRKDFYRNFAAMLRRRYRTIAVEDMDLRSAIHDVLRPEEERETVTAQRRAARFAALSVLVAAIKDSGADVVAVEQAGTTSTCSWCGASNEVGTGVIHTCVGCGREWDRDDNAARNICARGEVAVKTR

SEQ ID NO: 65 - protein, 620 aa, Unknown
  Description of Unknown: aquatic-freshwater-anoxic lake water sequence
MSSKNYTYGLQTPVGNRDRVLDQLRLASVYRNKLVEIELARRAATDDTLRELCPGLLECEAELADVNAKIAEAIAEHKAKNAKARCLTDDKEIKAALTQLKCIRKELATTRKRLRDDGFSPLTEADLSLVPGLAEATKIHAAAENPHAKAKAAAVMHECRSSWLNDPSRPTPIRRLAIQIQLAEIGYAANEAQKTARKTSGLAPGSYLLVDQAADAFRKGAPPVFRGYQGEGRVGVQIVGGMNSEEANSGRDTRLRIVHTPQAEQRVAKNGRVLPAPGAKRQAQQYTLWLRIGSDGRTPTWATWPLILHRPIPETTRIMWAIVQRRIVGGHERWQLTLNLRDDTNAAFARRDVTASGVCGVDIGYRYIDDRAQRVAYWHGSDGASGELQLPSGKVAQWKKVDDLQSIRDGLHNEARAALRDWLATNAHPEWLDEATEHMHAWRRLSRLDRLVAQWRGQRFDGDAEIMATLESWRTRERHLWQYQEQMRDQLLAWRKDFYRNFAAMLRRRYRTIAVEDMDLRSAIHDVLRPEEERETVTAQRRAARFAALSVLVAAIKDSGADVVAVEQAGTTSTCSWCGASNEVGTGVIHTCVGCGREWDRDDNAARNICARGEVAVKTR

SEQ ID NO: 66 - protein, 588 aa, Unknown
  Description of Unknown: aquatic-freshwater-aquifer sequence
MTRVFEYGLPFDPFDGAELVDEQILLAHRYYNKLIELEHTRRSSILAVQRADPKVGPLLAAYDAANAEVEDLLARKREAKSRDRRVAAPELSEIEAAKEARRHLSVQLRKVKKVATDRLKPEYDLAEQATRDAKKAARAASGVFWGTYSLIEQAADAAAKAKPVLRPGTHPRPWDQQPSFRRWTGEGMVAVQININRPLNDVTVFGDDLRLRITPVDPAAWSDATSRGDRKCLARTNVTMRVGRNTGETATWPMVMHRPLPAGSRVTWAKVLRWRLDDRPHWFKYVLQLTVETADAPRHPGLVSLPPAIVAINCGWRALPNGSLRVVTWVGSDGAEGVLDLGCREYRDRIERAESIRSVRDQLRNELTSKLVGIGIDVTRWRSFDRFHRLFRELTAEGCERNEAVELLEAWHHRDRHLRQYQDGARGGALRFRREQYRLLAVELARRYPVVCVESWDLRPVVTDEDRLPGPAAARVEGASSTARLALASAATREGCVVLTQIAAHVRLQTQTCHVCGYGAKKGEEWDAAAELVHTCEGCGETWNQDVNFCRNILAASRAAVTEIPELLVPKIMKRSARFAARHKKVAT

SEQ ID NO: 67 - protein, 685 aa, Unknown
  Description of Unknown: aquatic-freshwater-bog sequence
MLVYKWGIGPLPLEARQIIDREVRAAHRYRNRLVEIERSRRAAYRDLRNSLSPELAHLHAAYAAADRAVVEGRRLLSGVPRAERARHPVAAEVRRLSAARSGAWKAYAEARDRTTADVFGAADQKYREAKQSVTAAVGFACAVARFARGADPGPIGPHVLAAITAAVRERALADPAVGEPWKAKTRSQMEHEALAKRARAECGCAVGTYLAVEAAAEKSFAECAGDPPFSRLECERVGLQVRGGGLSADDVVGAAVGQVRVEFPADMTARANGTRYAVVHLHLSGRGDQATWLHLPVVWHRDMAPEARVRWAYVVARRVGLVWHYELQLTCDSVDRARAQSAGARGTIALNLGWRALKNGDLRVATPWSGSASRAEDRLVLPRSFREGSDLADRLLSYADEHFLAVRDALAGWFKGGERSLFSPEQVAAWSLDTVHAWRSHGRLARVALDLRRDWLEARGVDVPALWKAWRLERSPKLDLFGPLDEIKAWLAGRGVVSADQVLAVYLDWWRAKDRHLVNWARNNDLRLRRSRRDRYRCYARDLAARYERVVIEQWNKSETAETPDPEADTRTEQEVRGNSNRVLACVSELVDALEAAFGEANVHRAPSERITVEHHGCGGESSDPLPQIPVTCFACGQVYDQDLNAAKHLYDRHSGEPSGGVNVGGGARGAKKSRRVEGFGRAAE

SEQ ID NO: 68 - protein, 702 aa, Unknown
  Description of Unknown: aquatic-freshwater-bog sequence
MSENMPTLVYRYGIAAPHDNADLVYEQLRLAHEYRCSLVRIERTRRAEERAARLAVSAEVAAAEAAVAAADAECERLATEIRKARSDARKRVETQQMRDALAKAREVRKERKTALFELRDRYQPQCRDCRATKSEDKPCPHVGQEAQSFCLVLDAIAERAKESIRKARAESGLYWGSYLLVDRAMAASRKAPLYGDDGITPNDPKMPRFDGGGAVAIQFQSSSVRPSNVRLADLGPDNARLQIVLPPWPEQCMPAPESHQGPFDPSRPPAGMRPDGTLAPATRADGSPARWLRRRANRQALVRMCVKTEGRGKPVWAAWRLDYDRPLPAQAIISWATIHRRMRGPHAEWSLCLTVEVAAEPAAEIRSGQVAIDVGWRQMPCPGGAACHGQRTDCHELRVAAWRDHGGGSGELRLSARDIRALRQPAELRSKRDTQFDAIKAAVAGWIRSASDAPEWMREAAKVMHAWRWQGRMVALVRQWAQERPNRAAPEEAVYQAALAWQTADWALWESERARDAWAHRRRREIYRVWAARMAETYGTLILERFDLRDVTERAPVGQDDSENETARSNRHLAAVSELRGALCNAVRTRGSEVVGVTAVNSTRTCPSCGLVSDRNQAQAVQLACECGHVWDQDVEGAAPWLLAEYRERPGDAKLQAGARAEAIAAARKGKKGNDWARAKRMGAAKKGRLQAARESAATEAQ

SEQ ID NO: 69 - protein, 629 aa, Unknown
  Description of Unknown: aquatic-freshwater-bog sequence
MKLVYKYGLATPHDNRELVEEQMRAAHRYRNTLTEIERGRRAAVRQAEAEAGDMPKALQALRASEAELEAALTAIRRHRARTSKRDEPVALKASAKAAREAKRAASKAFRDLRRRIAEDPMVVAAKDAIGERANELGRSARAHSGVYWGSYLLVEAAASASFEDTPMYASDGRPTDPAFVRWTGEGEVGVQLQGGLGADEATACTDTQLQITQPDERAWERRGRTHRECEQMARQAQLRMRVQSDAKGKPVWATWRMDMHRPLPEGAIIKLATVHRVRVGPHSKWYVTITLDVPARARVSPSSGTVAVDVGWRVVGDELRVAGWQDTTGARGELRLSPRDIAMLRAPEAMRSERDRRFDAARANLLGWLRSHQELVPEWLAKATTTLHAWRSEARLVALYSRWSGSRFEGDEQPYYALASWRARARHEWAVESCARDQALRRRRERYRVWAAQLASKYNTIVIEKFDKREVAVIPAPDVQVEQNAEQAARDKAARSNRFLAATSELCDCLVTAARSRGCTVIAVPCEDTTRTCPVCGLVESRDAAAAIELTCECGASWDQDVDGAPAVLLARARERPGDTKILVGAREDEKKNENGQKPESQWQRVRRMRAEKEARMGTAREAAPEGAE

SEQ ID NO: 70 - protein, 560 aa, Unknown
  Description of Unknown: aquatic-freshwater-bog sequence
MTTRVYQFALLPPSGRDAALVDAQMRLAWEARQDMAMIERGRRSAMRALLDTPDVRAAEEALKAATRSTRKDVIRVVSRARRDALERAVASERYDDEACQETGYCPLYEPERIEQLAKLATKGAYHYFGDRGLAWGTRLDVSGAADAARKAPLYDDDGLTPSDPHVERWYDAKRPPDSQLAVQLQGGLSTPDGLTGQDTRVRLVDGVLWLRVGSDGRAPVWAKFAIARPHRTGKRGVRTTHRAIPDDAKWKWVRVSRRRDGPWMRWSVEITLDVEREDWRVRDPQVQGVLAVEVCWDRPDDAIVVARWRDDSGRSGTIELPDRIATGLPKVHGIRAVRDTIRADMAKRLQRALTEDRDPKPVWLADAAGSMHLWKSSSRFHRLIQQWQDERCDAARPAYELLDAWRLRDNHLYEYETGARGNVLRWRKNWYQTLAAEWARRYRIVVLDDRNLSREARWGEASEIRFMASPFELRQAIRNAFGRDVAEHTVKQTEKEKDEDDRDWCERALDARNAGVARTERETSEIKDKRGGAWAKRKQAKTTRHAEREAARKAVVKAAE

SEQ ID NO: 71 - protein, 618 aa, Unknown
  Description of Unknown: aquatic-freshwater-bog sequence
MAVYVYQFGLSAPFGENADLVYDQLFATHRYRNTLIEIERGRRAAVRAVIDASNAQTVALTAEVARWNAETEALAKRIKSQRASTRTRSESESDREALRQAREARKAAVTKLREARLAQRTDAAMTAAIDAINERANGLVRGARELTETYWGTYLLTEKAMQDSKALPLYGDDGISPNDPKFLRWEGDGALGVQIQGGAKAATILAEASTLLRMRPDARAYLERACDQRRIKDKTGLLTMRVGSDAKGGPIWATWHMHMHRLIPENAMIKGATVHLRKVGTKAEWSLEVTVEHSRAALPPNDKTIAIDIGWRMIGDELRVAGWMDSDGKTGELRLSAKDIRLLRRPEEIRGERDRHFTLAKTALGSFLASAAQVPDRLRAETAHLDRWGSADRLAAVVARWERFEGDAAIHNVMTAWFWRDRNLCDQEAGMRLQALRRRKNKYREWAAWVTETYGTVVVEKFDLRAVALRGAVEDPAANETARSNRQLAALSEARTAIVNAASSRGRLIAAMPAHDTTRACPSCGVVEAREAEASIVLVCPDCGATWDQDVTGAPVVLLGRWRERPGDAKILVSARDGANDNESETMRPNRWQKVKEARTAKVLRRESARAEASNGAE

SEQ ID NO: 72 - protein, 591 aa, Unknown
  Description of Unknown: aquatic-freshwater-bog sequence
MKELRGNHELRNRLVEIERERRKAVRALCADLPELAAAQVCRTALDEALQTIKKARSETKKRSESAEDVKRAKEARKAYQEALRALALARRARLSACEAEIKVVNDESAKREKEAYGESPVEAWGSKLDVFAAHAAVRAMPYWDELADNDPHFVRWEGEGQIAVQLQGGLRVGAALSGGDRRFQLTDLVPEAFEATDAAKNPRDRRRLRGAVGRLRIGSDARNPIWTEVRVQVHRPLPPSGIIKWARLSRRRVALAYAWSLEVTVDVPLSAVARPGVVGLDLGWRKKPDGSLRVGYLAFRETAKDAIATRTRELVLPASLVQRFARLREAESERTHAFEMERMWLSRLLSTFVELPDWLKKESETLSQWRSPARLARLARIWSENRFERDELPYERLRGWAAGDALRYQENEEARQSALRAREWYYGNWAAACANAYGALAVENMNISRLIRHRDPDADEPAHEERARSRAVAAPGRLRQVFAHAFEGRGGIVMLRPTKNTTITCPTCGDVRKFDAAEILAPTCANGHTIDQDERAARNLCEGVSGEEAAEAARAREVRESTPKESRWAKVKRMKREKEEGALARGVGSAG

SEQ ID NO: 73 - protein, 610 aa, Unknown
  Description of Unknown: aquatic-freshwater-bog sequence
MNRVYRYSCSPPKTEAERVMKELRGNHELRNRLVEIERERRKAVRALCADLPELAAAQVCRTALDEALQTIKKARSETKKRSESAEDVKRAKEARKAYQEALRALALARRARLSACEAEIKVVNDESAKREKEAYGESPVEAWGSKLDVFAAHAAVRAMPYWDELADNDPHFVRWEGEGQIAVQLQGGLRVGAALSGGDRRFQLTDLVPEAFEATDAAKNPRDRRRLRGAVGRLRIGSDARNPIWTEVRVQVHRPLPPSGIIKWARLSRRRVALAYAWSLEVTVDVPLSAVARPGVVGLDLGWRKKPDGSLRVGYLAFRETAKDAIATRTRELVLPASLVQRFARLREAESERTHAFEMERMWLSRLLSTFVELPDWLKKESETLSQWRSPARLARLARIWSENRFERDELPYERLRGWAAGDALRYQENEEARQSALRAREWYYGNWAAACANAYGALAVENMNISRLIRHRDPDADEPAHEERARSRAVAAPGRLRQVFAHAFEGRGGIVMLRPTKNTTITCPTCGDVRKFDAAEILAPTCANGHTIDQDERAARNLCEGVSGEEAAEAARAREVRESTPKESRWAKVKRMKREKEEGALARGVGSAG

SEQ ID NO: 74 - protein, 717 aa, Unknown
  Description of Unknown: aquatic-freshwater-freshwater lake hypolimnion sequence
MNPASMAPKGMIVGLLMTYNIYLPLLFCKFEACRIYLGVLAIGQARYTSEKLEAKKMLDKGAKVTFTYDGNETSGKILHILAAGKKPAAYFDILTAADKALEADRCFDETRSCEDESYLVVTKRSKNTVAKIYWLSKDDLSGVQVVVRQYGLLQPSNWQDDCFNHLYLQNRYWNCLVEIEQDNRNKYRALVGEDEDVAPIQDAIDGLKSRIADMAEQRTQLKIEHCKKIGIHTEPLDNAIKAAKAEMKKLSNKAKEARAVAKERIRAAGPAFKLLEDERRQSVKEAYNNSQLWWGNYNAITNSYNTARTRAMKEGADLRFHRFDGSGRFTCQIMGGMSTDDLLSGRNSVAQLRKVSNSEFTKIIKSNPPALQLQLVGSRRDEREYGVLSITIYTAEDDQGKKTRRTLDFPIILHRPLPENATLKIISVNRKKIGTDYRWAVTFTFSEETKESIVHTSKQTCGINLGWKQVAGGLRVATVSDGTSTRHVVLPQVIIDKLAYTESLQSRIDTATNENFIWLLGKMADPPEILKGDVTSLKRSKRPHPAKFAKFVIKWRNECSEFEPQALIEAEVMRKNVKRLSLEHHHLRDKVLRRRIDFYRNEAKKIADKYSMIVMDKMDLRQMSALEKSDGTPNELADLARYHRKVAAISEFREWIGKQAIKAGGAVEMIAIESTRTCNACDGVMAPSDGLMFRCKSCGTFVDQDENASANLLRAVT

SEQ ID NO: 75 - protein, 611 aa, Unknown
  Description of Unknown: aquatic-freshwater-freshwater microbial mat sequence
MSVRVYKYGLRRPHEQGERVRAQMRAAHRYRNTLVEIERARRTAVRSAMSAYGNIGELEAAARSADVVVSDAVRLAKAAKAEARSHSGVSSDQKAALLAARERKRDAVRLLRETRVLLRQDVVLSTEVDRVNELAAELRRNARKHCGVYWGTYLLIEAADEAARKVPLYDGAEPSDPRFMRWAGEGRVGVSIAKGADIAVLDDTKDTRIRIEPGTMPKGADPASKRSAKRRHAVLAMRVGSGDQREPVFARWEMVMHRSLPAGARIKNAAVSLRLVGPREEWSVAITLDTTACAETATRGRGVVGVDLGWRMLNGDIRSAAWDGGDVSGFLALPAELIGQVEKVADLRSIRSKNFDASRAALVAAMPADAPAWLRGATASLGQWKSIDRLTKLALRWRVARFDGDAAAYDALEAWRYNDHHLWCWESEQRTRTLRHRREIYRIFAAKLAREYETLAIENFDLRVFSVRAPVETDASIDTVTRAARVVVSPSELRLSLVNAFGPHRVVKVDAANTTRECSECHHINTWDAAAELSHTCAQCGARWDQDANAARVIRARGTAASPAPGAARNGDSANDSAAPIESRWAKAKRMRAEKRSGEGGARKPVDAAAE

SEQ ID NO: 76 - protein, 588 aa, Unknown
  Description of Unknown: aquatic-freshwater-freshwater microbial mat sequence
MRAAHRYRNTLVEIERARRTAVRSAMSAYGNIGELEAAARSADVVVSDAVRLAKAAKAEARSHSGVSSDQKAALLAARERKRDAVRLLRETRVLLRQDVVLSTEVDRVNELAAELRRNARKHCGVYWGTYLLIEAADEAARKVPLYDGAEPSDPRFMRWAGEGRVGVSIAKGADIAVLDDTKDTRIRIEPGTMPKGADPASKRSAKRRHAVLAMRVGSGDQREPVFARWEMVMHRSLPAGARIKNAAVSLRLVGPREEWSVAITLDTTACAETATRGRGVVGVDLGWRMLNGDIRSAAWDGGDVSGFLALPAELIGQVEKVADLRSIRSKNFDASRAALVAAMPADAPAWLRGATASLGQWKSIDRLTKLALRWRVARFDGDAAAYDALEAWRYNDHHLWCWESEQRTRTLRHRREIYRIFAAKLAREYETLAIENFDLRVFSVRAPVETDASIDTVTRAARVVVSPSELRLSLVNAFGPHRVVKVDAANTTRECSECHHINTWDAAAELSHTCAQCGARWDQDANAARVIRARGTAASPAPGAARNGDSANDSAAPIESRWAKAKRMRAEKRSGEGGARKPVDAAAE

SEQ ID NO: 77 - protein, 603 aa, Unknown
  Description of Unknown: aquatic-freshwater-freshwater microbial mat sequence
MSIRVYKYGLRRPHEQSERVRAQMLAAHRYRNTLVEIERARRAAVRSAMSAYGNIGELEAAAHAADTVVLGVVRLAKAAKAEARSHSGISSDQKAALSAAREHRRDAVRLLRETRVLLRQDVVLSTEVDRVSELACELRKSARKHCGVYWGTYLLIEAADEAARKAPLYDGAEPSDPRFARWIGEGRVGVSIMKGADISVLDMEDTRIRIEPGTMPKGADPTSKRSAKRRHTVLAMRVGSDDQRGPIFARWEMVMHRPLPAGARIKNAAVSLRLVGPREEWSVAITLDTTACAETATSGRGVVGVDLGWRMLDGDIRSAAWDGGDLSGYLALPAELIGQVEKVADLRSIRSKSFDASRDALIAVMPTNAPAWLRAATSSLRQWKSINRLTKLALRWRVARFDGDAAAYDALEAWRYNDHHLWCWESEQRTRTLRHRREIYRIFAAKLARKYETLAIENFDLRVFSVRAPVETDASIDTITRAVRVVVSPSELRRSLINAFGPHRVVKVDAANTTRECAECHHINTWDAAAELSHTCAQCSARWDQDANAARIIRARGAAASPQGRNSDSATTTESRWAKAKRMRAEKRSGEGGDRKSVDTAAE

SEQ ID NO: 78 - protein, 555 aa, Unknown
  Description of Unknown: aquatic-freshwater-freshwater microbial mat sequence
MSAYGNIGELEAAAHAADTVVLGVVRLAKAAKAEARSHSGISSDQKAALSAAREHRRDAVRLLRETRVLLRQDVVLSTEVDRVSELACELRKSARKHCGVYWGTYLLIEAADEAARKAPLYDGAEPSDPRFARWIGEGRVGVSIMKGADISVLDMEDTRIRIEPGTMPKGADPTSKRSAKRRHTVLAMRVGSDDQRGPIFARWEMVMHRPLPAGARIKNAAVSLRLVGPREEWSVAITLDTTACAETATSGRGVVGVDLGWRMLDGDIRSAAWDGGDLSGYLALPAELIGQVEKVADLRSIRSKSFDASRDALIAVMPTNAPAWLRAATSSLRQWKSINRLTKLALRWRVARFDGDAAAYDALEAWRYNDHHLWCWESEQRTRTLRHRREIYRIFAAKLARKYETLAIENFDLRVFSVRAPVETDASIDTITRAVRVVVSPSELRRSLINAFGPHRVVKVDAANTTRECAECHHINTWDAAAELSHTCAQCSARWDQDANAARIIRARGAAASPQGRNSDSATTTESRWAKAKRMRAEKRSGEGGDRKSVDTAAE

SEQ ID NO: 79 - protein, 571 aa, Unknown
  Description of Unknown: aquatic-freshwater-freshwater microbial mat sequence
MSSRSKENRMFGHESKPTRNYVYGILAPTEGADLVDEQLRAAHQYRNNLVRLELDRREAVQQCLLAMRPAVARLTGEVADAVTAYDAAAAALKVRNARERNKRASADERQASKDAAALLKGLRGQLKAVRTEAFAADDVRAALDAIETVASERRREARGACGVYWGTYLTVEQAAGSFRSGAPPIFHRWTGEGRLAIQLQNGVEPAVLTLGQDKRLRIELTGECGRGKRPLAVAWLRVGSDGRAPVWAKFPMVYHRPIPVDAKIKWAFVHRRRCGTFWRWQLMLSVARDAWESPTTSGGSVGIDLGWRVVPEGLRVASWAGDDGRRGELILPADDLRRWSEPATRRAERDVRFGEFLPRVADWFAANAGRFGEEMRERVKTIRQWRSPARLAGLLRAWSAERVTGDEEIYGELVRWMREDSREWNSESGQRARASRWRDDYYRCFVKRLASEYRVVHVEDMDLREIKRKPKAEEAESENQTARGNAFIASPGRLRELIREGFAETMSIDAAWTTQRCHACGEIDGFDAAAELVRTCRHCGVAEDQDYRAAMNLLHGEQPDADEMAVVARGV

SEQ ID NO: 80 - protein, 562 aa, Unknown
  Description of Unknown: aquatic-freshwater-freshwater microbial mat sequence
MFGHESKPTRNYVYGILAPTEGADLVDEQLRAAHQYRNNLVRLELDRREAVQQCLLAMRPAVARLTGEVADAVTAYDAAAAALKVRNARERNKRASADERQASKDAAALLKGLRGQLKAVRTEAFAADDVRAALDAIETVASERRREARGACGVYWGTYLTVEQAAGSFRSGAPPIFHRWTGEGRLAIQLQNGVEPAVLTLGQDKRLRIELTGECGRGKRPLAVAWLRVGSDGRAPVWAKFPMVYHRPIPVDAKIKWAFVHRRRCGTFWRWQLMLSVARDAWESPTTSGGSVGIDLGWRVVPEGLRVASWAGDDGRRGELILPADDLRRWSEPATRRAERDVRFGEFLPRVADWFAANAGRFGEEMRERVKTIRQWRSPARLAGLLRAWSAERVTGDEEIYGELVRWMREDSREWNSESGQRARASRWRDDYYRCFVKRLASEYRVVHVEDMDLREIKRKPKAEEAESENQTARGNAFIASPGRLRELIREGFAETMSIDAAWTTQRCHACGEIDGFDAAAELVRTCRHCGVAEDQDYRAAMNLLHGEQPDADEMAVVARGV

SEQ ID NO: 81 - protein, 561 aa, Unknown
  Description of Unknown: aquatic-freshwater-freshwater microbial mat sequence
MTSVYRYGLLPPTLGADVVDDQMRAGHRYQNALVELERARRDAVAGVLSNNAIDEIDLEIKALDEELSARRAAIQAERGATKRKRVPHTTATRDIARRRELRGTRRTLIAARRADPAVMAALAGIEERAKVLHKQFRADSGVYWCTYLKVEQAMDAARKGAKFGPPSFRRWNGGGAVSMQLQRRGPERLLMTADNAIECDDPRLHLDLIPTPVPNRRGKPLPRVRLRVGSDGARRPIWAEWPMIYHRPLPDGAVITWATVIRELVASSPRWALLLTIEHGGVAPTAARGAAVAVDLGWRRAIVDGDITTRACGHTATDDSDESELHVHRDVFGALGKADNLRSIRDKRMNEMQAILVAWLRGCGSEEHRERTRFVAQWRACARFAGLAIWWRDHRIEGDELIFVLLEAWRKRDKHLWLWEAHARRTARARRLDGYRVFAADLARRYETLIVEKINLAKVAEKPKPESTREHNATASSQRTATAPSELRGALVNAFRGRGGTVVEVGAHPSATAMLGEWRERPVAEEKPGVARMSKFGRLRAERGGSWAQRSRPLEGGSASD

SEQ ID NO: 82 - protein, 570 aa, Unknown
  Description of Unknown: aquatic-freshwater-freshwater microbial mat sequence
MTSVYRYGLLPPTLGADVVDDQMRAGHRYQNALVELERARRDAVAWVLSDGVIDEIDRGIEALSEELSAQRAGIQAERGATKRKRVPHTAETRGLDDRRRELRGTRRTLIAARRADPAVMAALAGIEERAKVLSKLLSKSSGVHWGTKGVVHQAMDAARKGAKFGPPSFRRWNGGGAVSMQLQRTGREKRPLTADDAIECDDTRLHLDLTPTPVPNRRGKPRRGKPLPRVRLRVGSDGARRPIWAEWPMIYHRPLPDGAVITWATVIRELVASSPRWALLLTIEHGGVAPTAARGAAVAVDLGWRRAIVDGDITTRACGHTATDDSDESELHVHRDVFGALGKADNLRSIRDKRMNEMQAILVAWLRGCGSEEHRERTRFVAQWRACARFAGLAIWWRDHRMEGDELIFVLLEAWRKRDKHLWLWEAHARRTARARRLDGYRVFAADLARRYETLIVEKINLAKVAEKPKPESTREHNATASWQRTATAPSELRGALVNAFRGRGGTVVEVGAHPSATAMLGEWRERPVAEEKPGVARMSKFGRLRAERGGSWAQRSRPPEPLEGGSASD

SEQ ID NO: 83 - protein, 565 aa, Unknown
  Description of Unknown: aquatic-freshwater-freshwater microbial mat sequence
MFGHESKPTRNYVYGILAPTEGADLVDEQLRAAHQYRNNLVRLELDRREAVQQCLLAMRPAVARLTGEVADAVTAYDAAAAALKVRNARERNKRASADERQASKDAADLLKGLRGQLKAVRTEAFAADDVRAALDAIETVFRERRREARGASDVYWGTYLTVEQAAWSFRSGAPPIFHRWTGEGRLAIQLQNGVEPAVLTLGQDKRLRIELTGEYGRGKRGKRPLAVAWFRVGSDGHTPVWAKFPMVYHRPIPVDAKIKWAFVHRRRCGTFWRWQLMLSVARDAWESPITSGGSVGIDLGWRVVPEGLRVASWAGDDGRRGELILPADDLRRWSEPATRRAERDVRFGEFLPRVADWFAANSGRFSEAMRERVKSIRQWKSPARLAGLLRAWGDERVVGDEEIHAELVTWMREDSREWNSEAGQRARASRWRDDYYRCFVKRLAIEYRVVHVEDMDLREIKRKPKAEEAESENQTARGNAFIASPGRLRELIREGFAETMSIDAAWTTQRCHACGEIDGFDAAAELVRTCRHCGVTEDQDYRAAMNLLAGEQPDADEMAGVARGV

SEQ ID NO: 84 - protein, 574 aa, Unknown
  Description of Unknown: aquatic-freshwater-freshwater microbial mat sequence
MSSRSKENRMFGHESKPTRNYVYGILAPTEGADLVDEQLRAAHQYRNNLVRLELDRREAVQQCLLAMRPAVARLTGEVADAVTAYDAAAAALKVRNARERNKRASADERQASKDAADLLKGLRGQLKAVRTEAFAADDVRAALDAIETVFRERRREARGASDVYWGTYLTVEQAAWSFRSGAPPIFHRWTGEGRLAIQLQNGVEPAVLTLGQDKRLRIELTGEYGRGKRGKRPLAVAWFRVGSDGHTPVWAKFPMVYHRPIPVDAKIKWAFVHRRRCGTFWRWQLMLSVARDAWESPITSGGSVGIDLGWRVVPEGLRVASWAGDDGRRGELILPADDLRRWSEPATRRAERDVRFGEFLPRVADWFAANSGRFSEAMRERVKSIRQWKSPARLAGLLRAWGDERVVGDEEIHAELVTWMREDSREWNSEAGQRARASRWRDDYYRCFVKRLAIEYRVVHVEDMDLREIKRKPKAEEAESENQTARGNAFIASPGRLRELIREGFAETMSIDAAWTTQRCHACGEIDGFDAAAELVRTCRHCGVTEDQDYRAAMNLLAGEQPDADEMAGVARGV

SEQ ID NO: 85 - protein, 571 aa, Unknown
  Description of Unknown: aquatic-freshwater-freshwater microbial mat sequence
MSSRSKENRMFGHESKPTRNYVYGILAPTEGADLVDEQLRAAHQYRNNLVRLELDRREAVQQCLLAMRPAVARLTGEVADAVTAYDAAAAALKVRNARERNKRASADERQASKDAAALLKGLRGQLKTVRTEAFAADDVRAALDAIETVASERRREARGACGVYWGTYLTVEQAAGSFRSGAPPIFHRWTGEGRLAIQLQNGVEPAVLTLGQDKRLRIELTGECGRGKRPLAVAWLRVGSDGRAPVWAKFPMVYHRPIPVDAKIKWAFVHRRRCGTFWRWQLMLSVARDAWESPTTSGGSVGIDLGWRVVPEGLRVASWAGDDGRRGELILPADDLRRWSEPATRRAERDVRFGEFLPRVADWFAANAGRFGEEMRERVKTIRQWRSPARLAGLLRAWSAERVTGDEEIYGELVRWMREDSREWNSESGQRARASRWRDDYYRCFVKRLASEYRVVHVEDMDLREIKRKPKAEEAESENQTARGNAFIASPGRLRELIREGFAETMSIDAAWTTQRCHACGEIDGFDAAAELVRTCRHCGVTEDQDYRAAMNLLHGEQPDADEMAGVARGV

SEQ ID NO: 86 - protein, 562 aa, Unknown
  Description of Unknown: aquatic-freshwater-freshwater microbial mat sequence
MFGHESKPTRNYVYGILAPTEGADLVDEQLRAAHQYRNNLVRLELDRREAVQQCLLAMRPAVARLTGEVADAVTAYDAAAAALKVRNARERNKRASADERQASKDAAALLKGLRGQLKTVRTEAFAADDVRAALDAIETVASERRREARGACGVYWGTYLTVEQAAGSFRSGAPPIFHRWTGEGRLAIQLQNGVEPAVLTLGQDKRLRIELTGECGRGKRPLAVAWLRVGSDGRAPVWAKFPMVYHRPIPVDAKIKWAFVHRRRCGTFWRWQLMLSVARDAWESPTTSGGSVGIDLGWRVVPEGLRVASWAGDDGRRGELILPADDLRRWSEPATRRAERDVRFGEFLPRVADWFAANAGRFGEEMRERVKTIRQWRSPARLAGLLRAWSAERVTGDEEIYGELVRWMREDSREWNSESGQRARASRWRDDYYRCFVKRLASEYRVVHVEDMDLREIKRKPKAEEAESENQTARGNAFIASPGRLRELIREGFAETMSIDAAWTTQRCHACGEIDGFDAAAELVRTCRHCGVTEDQDYRAAMNLLHGEQPDADEMAGVARGV

SEQ ID NO: 87 - protein, 611 aa, Unknown
  Description of Unknown: aquatic-freshwater-freshwater microbial mat sequence
MSVRVYRYGLRRPHEQGERVRAQMRAAHRYRNTLVEIERARRTAVRSAMSAYGNIGELEAAARSADVVVSDAVRLAKAAKAEARSHSGVSSDQKAALSAARERKRDAVRLLRETRVLLRQDVVLSTEVDRVNELAAELRRNARKHCGVYWGTYLLIEAADEAARKVPLYDGAEPSDPRFMRWAGEGRVGVSIAKGADIAVLDDTKDTRIRIEPGTMPKGADPASKRSAKRRHAVLAMRVGSGDQREPVFARWEMVMHRSLPAGARIKNAAVSLRLVGPREEWSVAITLDTTACAETATRGRGVVGVDLGWRMLNGDIRSAAWDGGDVSGFLALPAELIGQVEKVADLRSIRSKNFDASRAALVAAMPADAPAWLRGATASLGQWKSIDRLTKLALRWRVARFDGDAAAYDALEAWRYNDHHLWCWESEQRTRTLRHRREIYRIFAAKLAREYETLAIENFDLRVFSVRAPVETDASIDTVTRAARVVVSPSELRLSLVNAFGPHRVVKVDAANTTRECSECHHINTWDAAAELSHTCAQCGARWDQDANAARVIRARGTAASPAPGAARNGDSANDSAAPIESRWAKAKRMRAEKRSGEGGARKPVDAAAE

SEQ ID NO: 88 - protein, 588 aa, Unknown
  Description of Unknown: aquatic-freshwater-freshwater microbial mat sequence
MRAAHRYRNTLVEIERARRTAVRSAMSAYGNIGELEAAARSADVVVSDAVRLAKAAKAEARSHSGVSSDQKAALSAARERKRDAVRLLRETRVLLRQDVVLSTEVDRVNELAAELRRNARKHCGVYWGTYLLIEAADEAARKVPLYDGAEPSDPRFMRWAGEGRVGVSIAKGADIAVLDDTKDTRIRIEPGTMPKGADPASKRSAKRRHAVLAMRVGSGDQREPVFARWEMVMHRSLPAGARIKNAAVSLRLVGPREEWSVAITLDTTACAETATRGRGVVGVDLGWRMLNGDIRSAAWDGGDVSGFLALPAELIGQVEKVADLRSIRSKNFDASRAALVAAMPADAPAWLRGATASLGQWKSIDRLTKLALRWRVARFDGDAAAYDALEAWRYNDHHLWCWESEQRTRTLRHRREIYRIFAAKLAREYETLAIENFDLRVFSVRAPVETDASIDTVTRAARVVVSPSELRLSLVNAFGPHRVVKVDAANTTRECSECHHINTWDAAAELSHTCAQCGARWDQDANAARVIRARGTAASPAPGAARNGDSANDSAAPIESRWAKAKRMRAEKRSGEGGARKPVDAAAE

SEQ ID NO: 89 - protein, 593 aa, Unknown
  Description of Unknown: aquatic-freshwater-freshwater sediment sequence
MIRVYKYGIKPPFDFGEDCVDELRRMNNYWNRLVEIDREREVAFRNLCRSWSPEYATAMDRIDALKQPIDAIYEEIRATRVKNRNKELPDEIKVRKDRLLGERKVLWETCKAIQKKLPKDLQEPLIQKYKTDCKLARQQSGLYWGNYNAVSESFETAKSRTIKEGGRLHFRLFDGAGRFVNQIQGGMTAVDLFTGAKSQAKCSASVIRKSRGGTPHHSFTFTAFTGRDVDGKRFRRELTADLAYHRPIPAEGTIKSIEIVRDIIDGHEKWHVCFTVSLPDIEIEHPKRNIAGVNMGWRQIGSALRIAVIVDDKNQKREYFLPATVAHKFEHAESIQAKADEAENEMLVWLREIYQAANQAPQEWKEAVQGVLRNRPARDAYAKLLSEWEGAQDLINGFDEYKAWHKENKKLHRYYAGTRRRAIAWREEIYRSIAKEIAENYAVIAITDTPLSQMSRTKSSGGLSIDNALPPAARRNRVIAGIYTLKEWIDKQAAKTGAVVEKITDKVTQTCHKCSAIADKRVGSERYITCTNCESELEVDENAAINSRKLASGEVTPKKELRKAAKYQRVREAMNAKNDSARKMADNSSDGVA

SEQ ID NO: 90 - protein, 535 aa, Unknown
  Description of Unknown: aquatic-freshwater-glacier valley sequence
MNNSTPTNPSERSEPLAALERVRVVQFGACAPTAGWEAGFLQHRLRTRFWNAICEIERNHRDTVQAIVGPLKEAGMPSKDAYASEDVQALELARKGKRLVARQEAAQGGLFWTGYLEVERAMDTARRGLEPPRFKRFEAHEGKLNFLFTNGLASSELCGDDLRVQFEPLELPEGCSARTRKANPYHVKLRVCSQDKKPVWLEFVAYLHRPIPEGSVRDVALIWRREGAKQRYSLSVTVREGGVIHAPAPFERAAINIGWKRLTHGLRVAYWRGTDGKHGEIVLSNAWLERYHHALGIESVRAKPLNSIKEQMLAYFRTTPDVPEEMATRVTHLAQWRSAARFAVLYKFWVGQRWHGDDAGFNALEAWHKRDVHLWQYGEGTSARLMRSRREQYRTFAAKMLERYGEIVMDKLDLRIFAELEARGDDLAPIARAQRVQAAPSTLRLALQNAYGREGRVVSWVGARTSSTCHVCRAPVVLGRDLIHTCQGCQSHWDVDDNACSNLLREPEAGIKIPKASRSPRARKNLALGTAVGAD

SEQ ID NO: 91 - protein, 599 aa, Unknown
  Description of Unknown: aquatic-freshwater-groundwater sequence
MKRSKSDKSARVYKFGSPLKTAVESEVAMEQLRLQNRFWNALVEADKVFTEKYWAIRDGADARLPVLRKQIEDIKVRTEEIRTEIKKGRQDGIKGTPSDLKAEIVELKAQKKPLIAEKKEIWAFVKDTVKPQLHELDGERYDKNVAIRQEYAQNGLYWGNYLAVMDSFETARMAIMKTQVEDGQKRPELQFHRFERVGRWTCQIQGGMNITQAFLGSNNYFQIDRLPADAWTHPSRGERGRLKRTKARIRIGSGEKKTVPIWLEIPIVMHRPIPESAEIKSVSIHVSKLADKFVWSLTVTVREDCSVPLERTGHCVAINIGWRAKGLATRIAYMLDSRGVEEEILLGSEYTVSNEKAASLQGIRKKNFNETVAWFNEWKKANADIVPPWLSERTKMMMSWKSEAQLASVAIQWSGRGFRREGDPPEFRFHGDEEAFNKIEAWRKQDKHLWQWHANLSDRIRGRRLCEYRKIALKLSKEYDVVIQEDFDLRKTKGKKKAEEGADNDDHIRRMSDLASVSTFRTETIRAMRSAGKEHVKLDSKNITKTCPFCGGTIKPGRKTNIMVQCSKCGKVYDQDWAASKNLLTAYLDSSGDVPPETP

SEQ ID NO: 92 - protein, 588 aa, Unknown
  Description of Unknown: aquatic-freshwater-groundwater sequence
MTRVFEYGLPFDPFDGAELVDEQILLAHRYYNKLIELEHTRRSSILAVQRADPKVGPLLAAYDAANAEVEDLLARKREAKSRDRRVAAPELSEIEAAKEARRHLSVQLRKVKKVATDRLKPEYDLAEQATRDAKKAARAASGVFWGTYSLIEQAADAAAKAKPVLRPGTHPRPWDQQPSFRRWTGEGMVAVQININRPLNDVTVFGDDLRLRITPVDPAAWSDATSRGDRKCLARTNVTMRVGRNTGETATWPMVMHRPLPAGSRVTWAKVLRRRLDDRPHWFKYVLQLTVETADAPRHPGLVSLPPAIVAINCGWRALPNGSLRVVTWVGSDGAEGVLDLGCREYRDRIERAESIRSVRDQLRNELTSKLVGIGIDVTRWRSFDRFHRLFRELTAEGCERNEAVELLEAWHHRDRHLRQYQDGARGGALRFRREQYRLLAVELARRYPVVCVESWDLRPVVTDEDRLPGPAAARVEGASSTARLALASAATREGCVVLTQIAAHVRLQTQTCHVCGYGAKKGEEWDAAAELVHTCEGCGETWNQDVNFCRNILAASRAAVTEIPELLVPKIMKRSARFAARHKKVAT

SEQ ID NO: 93 - protein, 623 aa, Unknown
  Description of Unknown: aquatic-freshwater-groundwater sequence
MRVYRYGLLRPTDEQELGLVREQMRLANKYRNWLVWLERGYRMALSELVDAHPSVAPFLSETEASEVKVDAKEVKIRRKRKATRSRSESTEDRQEVATERVSLTERRNALSAARWAALKGPLKAEAKRMNDLWEEMQKETRRQSVCGVFWGTSQIQDLAMKESRKALLWYRGKLALPDFVRWSDNQSVGVQVQDNIPPEDLFRQGSLVRIAPVSPQAWSEAVPRGDRKRLQRTVLSLRVQSDAKRQPVWAHWPMIMHRAIPAGCVVTRVAVRCRMIGPREEWYATITVDDSKAETAQPCGNGTVAMDLGWRAMKGGGIRVARWRDSDGGSGEFQLDEHIVSSLRKAEGLHATRDDNFNEARAKLQKWLAGAPDVPGWLRLDTETLGSWRSLERLQALAGKWKKNRFAGDEEGYAALEQWHYHDYHLWQWESDQRAKSLRHRRELYRIFAAKMACRYSTLVLEDFEIPGVAKKPTVEEDSEYNKNAAHNRQLASPHEFRECMKAAFVARDGMVQLLPCADTTRHCSVCGSLELFDQAKHLWHTCLACEGEGRATTWDQDDNAAQNLLDLWQNGADPVKTVSKALALANKREPAWIKAKRLARAKREADASGAVVQQPTEALEAE

SEQ ID NO: 94 - protein, 612 aa, Unknown
  Description of Unknown: aquatic-freshwater-groundwater sequence
MGLVSGIKVYRYGLLAPTENAHLVGEQMWLAHRYQNTLIEIERARRAALRAVYVAHGDVAAMTAVCQAATAEVARLYRDAKAARSQSRKRQIPSEIGDALKVAKEASREAQARLRAARLAIKTDPSVVASREQIEERAAWLRRNARAYCGVYWGTYLGIESAVSQTAKMPLYDGSEPNDPRFSRWEHEGTVGVQLQGGLAGAGAMRCDDTRLRIEVGTAPKGVDPTSRRSATRRYMVLAMRVDSDGRDPVWARWPMKMHRPLPDDAVIKWAHVHRRRRGPHDEWSVTLTIETSAARPAAPTGAVGIDLGWRSLDTDGIRVAAWHGSDGRSGTLVLSEWDLSRLEKANDLRSIRDKKFDAARAALSTWLENACVPAWFHEATAHLVQWKSIERLMGLVRRWKGSRFGGDDAAYEALEAWRYNDHHLWAWEAHQRVRALRNRREIYRVFAARMAREYHTVVLEDWNISKIAKRPAVDEETVADGNKNSRTARQSVAVSELRLALTHAFGARVEKVPCAFTTRDCHACGSVESWDQAAELVHTCSSCGVVWDQDANAAQNLLARFAARGGGDLDNAGTARGNETMNASETLKESRWARAKRVKAERIASDQVARE

SEQ ID NO: 95 - protein, 627 aa, Unknown
  Description of Unknown: aquatic-freshwater-groundwater sequence
MIPDGKRKGEKRMILIYEYGIPFDPMEGHDFVEDQILMAHRYYNKLIEIERAKRARIRAIQQAHPILGPLVTESDETHELFNDIIDRQKKAKSKDNRYPEVDPEEWEAAKEISAEVRLRLTAAKAAVKAELTPAYEAASQEAKDRKRLARANSKVYWGTYLITEAAAEAAVNAKPKSRPGKVPPPWHMCPAFRRWNGEGSLAVQIQKPKALTEVTVFGHDNQFRITPVDPYAWDKSTPRGLRCRLGRTTFTMRVGMKRGETASFRMVMHRPLPPGSRITWAKIIRRRVDDRLYRFRYFLQLTVETTLCVRHPGLDNADPVSIPVVAINCGWRALADGSLRVATWLGSDNRTGTLELGREEFRDRIERAESIRSRRDIDLDELKKAIEGFGEIFKSMEVECVEKWKSFSRFHGLYCDVLTEYAENPTEEKKELLELLTSWHHRDRYLMQYENGCRGGALRFRREKYRLFALELAKAYPVVCIESWDLRRIVEDEHRLKEPSAARVEGASSIARQITRNTSLREGCVVLKQGDKEVELATQRCHLCGYGAKKRERWDAAKELVHVCGGCGAEWNQDVNFCENILTTSRGDLVGAPQLLEPKIVIQLGRFQKRAAAKREREAAQADEQEE

SEQ ID NO: 96 - protein, 658 aa, Unknown
  Description of Unknown: aquatic-freshwater-groundwater sequence
MIPDETTTSLFAGKLSDPGRNSHRHCSPGNLVIPDGKRKGEKRMILIYEYGIPFDPMEGHDFVEDQILMAHRYYNKLIEIERAKRARIRAIQQAHPILGPLVTESDETHELFNDIIDRQKKAKSKDNRYPEVDPEEWEAAKEISAEVRLRLTAAKAAVKAELTPAYEAASQEAKDRKRLARANSKVYWGTYLITEAAAEAAVNAKPKSRPGKVPPPWHMCPAFRRWNGEGSLAVQIQKPKALTEVTVFGHDNQFRITPVDPYAWDKSTPRGLRCRLGRTTFTMRVGMKRGETASFRMVMHRPLPPGSRITWAKIIRRRVDDRLYRFRYFLQLTVETTLCVRHPGLDNADPVSIPVVAINCGWRALADGSLRVATWLGSDNRTGTLELGREEFRDRIERAESIRSRRDIDLDELKKAIEGFGEIFKSMEVECVEKWKSFSRFHGLYCDVLTEYAENPTEEKKELLELLTSWHHRDRYLMQYENGCRGGALRFRREKYRLFALELAKAYPVVCIESWDLRRIVEDEHRLKEPSAARVEGASSIARQITRNTSLREGCVVLKQGDKEVELATQRCHLCGYGAKKRERWDAAKELVHVCGGCGAEWNQDVNFCENILTTSRGDLVGAPQLLEPKIVIQLGRFQKRAAAKREREAAQADEQEE

SEQ ID NO: 97 - protein, 560 aa, Unknown
  Description of Unknown: aquatic-freshwater-groundwater sequence
MFGHESQPSRIYAYGAKAPVVNGERVGEQIWLGHRYRNTLAEIELRRREQTDKMVVTLSPELPGVEAKLLEADQAIESAAAEIKLANKQARRQKATPEQKTKLAALRKERAALRKKRKALRDVVFSDSGTHDALTGIDQRAAAEQREARAESGLYWGTYLTVEQGCQSFRKGRPPRFLRWTGEGRIAVQVQGGLAPEDAFGGEDKRLIVEPLPEDAWSKRSRGLKRTKAWLRIGSDDDRQPVWAVVPFVMHRSLPADCRIKWVYLHRRRVGTKDQWMLSFVIARQVWPQTDVAGSGEIGIDLGWRLLDHGLRVAAWAGSDGESGELVLPIQDVGRWQKAQDLRGIRDTRLDAVIARFGEWLSGNDAPDWLTERTRTLRQWRSAARLASVVLAWRDQRFAGDESIYADLEAWRKKDKHLYEWEANQRRKAVAWLKDLYRNFAAAMARRYRVAVLEAVNWRDMGRRAGVGESDKAGAARRQRVIASPGRLAECIRERFADCVSAPAEYTTQRCHACGEIDGFDARVEIVHTCGKCGKTWDQDYNAARNLLAFASGPVAKKTR

SEQ ID NO: 98 - protein, 561 aa, Unknown
  Description of Unknown: aquatic-freshwater-groundwater sequence
MMFGHESQPSRIYAYGAKAPVVNGERVGEQIWLGHRYRNTLAEIELRRREQTDKMVVTLSPELPGVEAKLLEADQAIESAAAEIKLANKQARRQKATPEQKTKLAALRKERAALRKKRKALRDVVFSDSGTHDALTGIDQRAAAEQREARAESGLYWGTYLTVEQGCQSFRKGRPPRFLRWTGEGRIAVQVQGGLAPEDAFGGEDKRLIVEPLPEDAWSKRSRGLKRTKAWLRIGSDDDRQPVWAVVPFVMHRSLPADCRIKWVYLHRRRVGTKDQWMLSFVIARQVWPQTDVAGSGEIGIDLGWRLLDHGLRVAAWAGSDGESGELVLPIQDVGRWQKAQDLRGIRDTRLDAVIARFGEWLSGNDAPDWLTERTRTLRQWRSAARLASVVLAWRDQRFAGDESIYADLEAWRKKDKHLYEWEANQRRKAVAWLKDLYRNFAAAMARRYRVAVLEAVNWRDMGRRAGVGESDKAGAARRQRVIASPGRLAECIRERFADCVSAPAEYTTQRCHACGEIDGFDARVEIVHTCGKCGKTWDQDYNAARNLLAFASGPVAKKTR

SEQ ID NO: 99 - protein, 589 aa, Unknown
  Description of Unknown: aquatic-freshwater-groundwater sequence
MQAKVYVYGLRPPTHEAERVAEQLHLAHRYRNDLVAIERKRRERVAALLSASGLSAHEERLEAAEQVLEAALSSLRAVRQAACKRAETSEQREAVKAARADVKAFREQLKEERKQLRPTLSAETETINDGAADERRAARAVCGVYWGTYLLIEQADEQARKSPTPPQFQRWTGEGAVGVQLQGGLDTDTVFGADTRLQIDPVPPTAWDRRRSPERRTRVRLRVGSDGRAPIWAEWPVTLHRPLPTGEIVWAKVLRQRVEAKSEWGLHLTIRVEDPTPTARSGAVGVDLGWRLREDGLRSGYWVGSDGEHGEILVDQRTLDRLQKVKSLCSIRDRNLDELRPWLAEWLRARRAGLPEWLRERTQYLHTWKAPRKFNALSVAWRAQRFPGDGEAVERLEAWRKQDKHLWTWETHQRERTLRCRREGYRLLAATLAERYGVLVLEDLDLRVFQQRRPAEAEQGECQPARSQQPVAATSILRSCLINAFEAVGGRVVKLDPAGTTKECWLCGGTAWSVQAEESVDRTCRECAALVDQDENAGRVLLARFERSGGIAGSADPDTSKSGQLRVSGGRWQRRKERCSKSGTQDCTA

SEQ ID NO: 100 - protein, 606 aa, Unknown
  Description of Unknown: aquatic-freshwater-peatland sequence
MKRKTSLVPTKVYRYGLLSPTSNGRLVDETIYRGHQFYNRLIEIERARRAEYRAERTRRFPELATVESLVEDLTKQIETMRTAIVATKIATQSRAVATDSAAELKRLRDERKIAHDRLVEMRAACKSDLDFSAWVKIANEKAYGLVKAARNSCGVAWGTYNLIAASAQQASATSTMDPEFRRYDGEGRIGVQIIGGMSVADLATDTQLQIAMPEFHDGMTRGEWRRASRTVVKMRVGSDENRRPIWAEFPAVIHRPLPEDARIMSAVITRRRLGVFRRWEYSLCISCESNKFDRTLPGLKQEGTATINFGWRQFSDGFRVATVNNDVTGIEEIRLPKTITDRFSKCEDLRSIIDMRFNIVRAELQEWLASHKADCPEWLTTSLEFLHLWKQPERLDRVVGNWAGLRFAADADIYSILADWRTKYRHLQDWQMMNRRQGLNMRKEFYRLVASRLAQHNAKLVVEAFDVRQVAVLPRPEEVASGGTAARHNRFLVAVGNLRSSILLAAQKYHCAVDVVKATNNTRRCNVCGKLLDWDPAKTVNRECPECSTWDQDVNATDNAVDRVASGEVVTMIAPAELAENGSIRPATKRSWGAARNELDKMPSLL

SEQ ID NO: 101 - protein, 623 aa, Unknown
  Description of Unknown: aquatic-freshwater-peatland sequence
MSAILVYKFGLLRPVDNATMVHQQVRAAHDYRNDLTMIERGRRAAIRSVLESEPDVAAALTGARAARALLDAALAVVASARASARTRAAGAPATGDVKSVRAVLHAAEGTFRQALQAVRTRSHVVSETDRINERAGELGRSARAHCGVYWGTYLLIEADMQASRKMPLYDGVEPNDPRYQRWTGKGRLGVQIQKGMSASAVFGADTRIRIDPVNERAWPATSTLGWSERRRLQHTTLHLRVSSDGAAPIWAAWPMSMHRPFPEGARIKGAVVNLRRVAGREEWTVCITLDVTDTQRAQCCGEGAVAVDLGWRLLCQPQAHNETGLRVGTWRGEDGAAGTMTLSHHWSGGELKARELRSIRDKAFEAARDALAVWLASPGDRPAWLAAKTRALGQWRSAHRLAAVAQWWAAHRFDGDAQAFAALETWRYHDHHLWQWETHQRETTLRDRREQYRIFAAGLARRYRTLVLEAFDLRKLARLPAPEQVDGEAQAPRSQRQLVAPSELRDALVKAFVARGGEVVEVSAVDSTRICHACGVVELWDQAAELRHTCSACGVEWDQDDNAGANLLTRYRERPSGDETPGPARKAEKTGKEGSKWARAKALRAERDTRTGAARKALAKCAE

SEQ ID NO: 102 - protein, 619 aa, Unknown
  Description of Unknown: aquatic-freshwater-peatland sequence
MEDVDLQYRMRYSCHNDLVAVELERRYTFRAYRSTLPEYAVVEQPYLELKKQRDAVREEIKLIRQKSRTRVETPEQNARVAALNAELKKQDVFLKIAAKKVSGDLGLVAVGKEADEVAKAATKAILDDYAARGLTWGTRALVVQELQAAKNAERDPKIHPWDNSGRIGLQLQGKNLSEEMVASGKHIASEQKRLRAMTKELGKKSKVVESFAERLLKMKQDRYAQKTPENRGLPISGLADDTRLQIVVPPEIAYQAASTRRGDRRRAARTTMKMRIGSTPKNAPIWMECKVTMHRQLPADGIIKWAWIRKKMLGTHEIYHLQLIIEAPSFEQKIAVADRMEAIAVDVGWRVREKNVLRIAYLVDTAGNRKEILLPTSIVEKLKHADSLRGKEDDAFNAIQDRLMEWIGLNKPILPAWFQDTFQFLAQSRSSKNLAWNVREWGRRRFAGDTLIYEEMTAWRRQFLHLYEWETNERAKAMGERKNFFRHVGLDLARSAHNVLLEDFKLAKIVENAQPEEDDDNPQTQRHNRVMSAISEFRQAIASACSAWRSTLWKLPAAYTTQDCHACHQEKDKHSKWDAAPAIVHTCQEKCGKTWDQDYNASMNLLGAWLRSRRTNRAA

SEQ ID NO: 103 - protein, 642 aa, Unknown
  Description of Unknown: aquatic-freshwater-peatland sequence
MVRKSTEDPTRIWSFRITEITSPMEDVDLQYRMRYSCHNDLVAVELERRYTFRAYRSTLPEYAVVEQPYLELKKQRDAVREEIKLIRQKSRTRVETPEQNARVAALNAELKKQDVFLKIAAKKVSGDLGLVAVGKEADEVAKAATKAILDDYAARGLTWGTRALVVQELQAAKNAERDPKIHPWDNSGRIGLQLQGKNLSEEMVASGKHIASEQKRLRAMTKELGKKSKVVESFAERLLKMKQDRYAQKTPENRGLPISGLADDTRLQIVVPPEIAYQAASTRRGDRRRAARTTMKMRIGSTPKNAPIWMECKVTMHRQLPADGIIKWAWIRKKMLGTHEIYHLQLIIEAPSFEQKIAVADRMEAIAVDVGWRVREKNVLRIAYLVDTAGNRKEILLPTSIVEKLKHADSLRGKEDDAFNAIQDRLMEWIGLNKPILPAWFQDTFQFLAQSRSSKNLAWNVREWGRRRFAGDTLIYEEMTAWRRQFLHLYEWETNERAKAMGERKNFFRHVGLDLARSAHNVLLEDFKLAKIVENAQPEEDDDNPQTQRHNRVMSAISEFRQAIASACSAWRSTLWKLPAAYTTQDCHACHQEKDKHSKWDAAPAIVHTCQEKCGKTWDQDYNASMNLLGAWLRSRRTNRAA

SEQ ID NO: 104 - protein, 623 aa, Unknown
  Description of Unknown: aquatic-freshwater-peatland sequence
MSAILVYKFGLLRPVDNATMVHQQVRAAHDYRNDLTMIERGRRAAIRSVLESEPDVAAALTGARAARALLDAALAVVASARASARTRAAGAPATGDVKSVRAVLHAAEGTFRQALQAVRTRSHVVSETDRINERAGELGRSARAHCGVYWGTYLLIEADMQASRKMPLYDGVEPNDPRYQRWTGKGRLGVQIQKGMSASAVFGADTRIRIDPVNERAWPATSTLGWSERRRLQHTTLHLRVSSDGAAPIWAAWPMSMHRPFPEGARIKGAVVNLRRVAGREEWTVCITLDVTDTQRAQCCGEGAVAVDLGWRLLCQPQAHNETELRVGTWRGEDGAAGTMTLSHHWSGGELKARELRSIRDKAFEAARDALAVWLASPGDRPAWLAAKTRALGQWRSAHRLAAVAQWWAAHRFDGDAQAFAALETWRYHDHHLWQWETHQRETTLRDRREQYRIFAAGLARRYRTLVLEAFDLRKLARLPAPEQVDGEAQAPRSQRQLVAPSELRDALVKAFVARGGEVVEVSAVDSTRICHACGVVELWDQAAELRHTCSACGVEWDQDDNAGANLLTRYRERLGGDETPGPARKAEKTGKEGSKWARAKALRAERDTRTGAARKALAKCAE

SEQ ID NO: 105 - protein, 556 aa, Unknown
  Description of Unknown: aquatic-freshwater-polar desert sand sequence
MSTLVYAYGCAPNTPICEEVDEQLHLAHEFYNKLVELEIRHENALDAMWREYPDIASMMDQIDTTDLIITELKKRGKAERVENVSTVTSEPLALELKRAKRGQKETRAALRTAKNRIKEDVALPKKHLLAEHQARAKAARIDFAHRGLYWGTYNRVWADMKVAVEGVIRKRTGGEPARLHFRRWDGTGTLAVQLQRQDGDPPRDPQGLAEGTTKWRNVFSVAPWMPPAEFDSMTRPAQLRIAEQGRVRMNVGASRVVKIPVLVHRMLPPDADVLGASLTVTRVAGRRRASVSVIVNLPDAAPVGDDGPRVSVTLGWSSVPHGIQVAKLSADRPLRIPADIADLVHRGPDPHTTEITVPAAWCNRLDSAMGLQSRRDTALDAIRSELVEYLRAHPDTSDRPITTTEVARWKAPARFAAVALRWRNNPPLPHGKMIAATLEAWRRTDRRRWEAETHTRRRALGCRRDGYRRVAAWLARECSEVTMSSTDLSKLAHRTEVGASASNAVPEEVAQLARQQRVLVAPSELRESIVAACRREGVSVASGAVRAPVSENARSA

SEQ ID NO: 106 - protein, 582 aa, Unknown
  Description of Unknown: aquatic-freshwater-polar desert sand sequence
MKSTLNWCYGAKTPDIEQAVSDAIFAAHTYRNQLCALELEKRARHYQVLVELSPDYVAACDAVTLVEVAAQAVEDLITAEKVTQRTQTPKNIKHLRDRATALAAELQVKRAVRKVAQCSAYAMPAVIAALDRSTAQHKAARKQAKQASGLYWGTEATVTESCRDFHKGPPPTFKRYDGTGQLSVQLQGGLDCADAERYNTLCYLGDSLGGKRRECFIRIGSDNRAPVFACVPIVFHRALPAGEIKRAYLERRKIASHVRWTIRFTIDIERDIPDRPMPGEVAIHTGWRMEEGSLRVATWLASDGSTGTLRLSQEHCADYLRLDSLEANRAAGLNEVIAELRTWAKSRELPEFLTEVKPHLHLWKSQARLAKLVWHWAEARFDGDSAMFERLDSWRKTDKHLWQHHRRLTVRISRRRRDAYRVFAKSLSERYGVAILAPIQVQKLTKKPTETRPPEDWELDQTQSRRHAAWAAVSDLTSCIRERFPLRCITVSSVNMTKECVNCGEINKADGRKIQCRGCGQTYDCDDNAVANTLARGDAALLDGALLALVTEQELKEAAKQAKLVKLQEANNAARTTRQTDL

SEQ ID NO: 107 - protein, 547 aa, Unknown
  Description of Unknown: aquatic-freshwater-sediment sequence
MFGHTSDPSLIFRYGALPPVEDGPVLEQMRAAHRYRNKLVEIERDRREKAAAIVSAASPDLAGLERQYAELGEQVESAAAEIKATNQRARKQRATLEQRAKLRTLRAERAEVYARLKEAKHTAYHSLAARAALDQLDAVTLDATKAARATCSVYWGTYLQIEAGLGSIRKGPPPRFLRWTGDGKLAVQIQGGMSRQEAEVGDSRLKIATLERRGKATNVYLRIGTDEMRNPIWAIVPVIFHRPIPDDAQIKWVYLLARRVGTHTRWAVCFVLSRATGWGKPDLATDGAVGLDLGWRILDHGLRVAYWCGSDGAGEEIVLPLRDVSRWQKADDLRAIRGKNFDAARDELALWLAGRDLPDWLIEQTRALRQWRNATRLAALAIHWREDRFTGDEEAFAPLEAWRTQDKHLLEWEANQRRKAVAWRDDFYRRVAADLSRRYKTLVIEDCNWREMGRLPEVGESNESGRAGSYRVIAAVGSLARVLRERFAETVSADPAYTTQRCHVCGQLAQAETRTSVWVKCNHCGEAWDQDRNAALNLLSAASGAVT

SEQ ID NO: 108 - protein, 538 aa, Unknown
  Description of Unknown: aquatic-freshwater-sediment sequence
MIFRYGALPPVEDGPVLEQMRAAHRYRNKLVEIERDRREKAAAIVSAASPDLAGLERQYAELGEQVESAAAEIKATNQRARKQRATLEQRAKLRTLRAERAEVYARLKEAKHTAYHSLAARAALDQLDAVTLDATKAARATCSVYWGTYLQIEAGLGSIRKGPPPRFLRWTGDGKLAVQIQGGMSRQEAEVGDSRLKIATLERRGKATNVYLRIGTDEMRNPIWAIVPVIFHRPIPDDAQIKWVYLLARRVGTHTRWAVCFVLSRATGWGKPDLATDGAVGLDLGWRILDHGLRVAYWCGSDGAGEEIVLPLRDVSRWQKADDLRAIRGKNFDAARDELALWLAGRDLPDWLIEQTRALRQWRNATRLAALAIHWREDRFTGDEEAFAPLEAWRTQDKHLLEWEANQRRKAVAWRDDFYRRVAADLSRRYKTLVIEDCNWREMGRLPEVGESNESGRAGSYRVIAAVGSLARVLRERFAETVSADPAYTTQRCHVCGQLAQAETRTSVWVKCNHCGEAWDQDRNAALNLLSAASGAVT

SEQ ID NO: 109 - protein, 610 aa, Unknown
  Description of Unknown: aquatic-freshwater-sediment sequence
MAICKVYRYGLLPPTENRDLVLKTLRLAHEYRNKLVEIDRQERAEIRAVQTSHGSIPALAAAAKSAIQAKETAYQAIKAHKAQDRTRKVPEPLKATYEAAKAAASAASQALWQARAALRGDPTVAIRRDEISLRYNEKRKAARAASGIYHGTYMRVEAADQQARKMTPLWDGVEPSDVKFARWRGDGGVGLQMKEKPGPADLPTSRWCRIEPRGAPKGADPSSKRSAKRRHCTLALRVGSEEREPVWARWPMVMHRPLPEDGEILWVTVTLRHVGPRQEWVALFTVRHEDKRQVPPAEPVDRVGVDIGWRKLEGGGVRVAAWRTDSGAEGELVLDEHMLGQLRKADDLRSIRDKNLDAARASLVAAMPGMSLPDWFPKNVWQWRAPARFSNLAKRWKQNRFPGDDLPYAQLEAWRYHDHHLWAWETSQRTKALRHRLDVYRVFAARMARTYTGLVIEDWDMRDTAEKPDAHEQEGDNEQARSNRVKSAVSELRRALVQAFVNVAKVPAAYTTQTCSACGAIEKWDQAAELEHTCSACGAQWDQDYNAARNLLAYVEQPGGPDNGGVARDEKKPNDGAEVQESKWAKAKRMGKEKRDRVDTARNTVPSAAE

SEQ ID NO: 110 - protein, 543 aa, Unknown
  Description of Unknown: aquatic-freshwater-sediment sequence
MSGEEFLLDQLRARVDYWNRLVEIERDFQAEKEQLLSAASAEMEQLATYIALTDGKLTEALSAGARARSQARTRRTPEPLAAEIAELRDRLRELRKQYREVRRTTFGNEKVKAALRTLGSERTAVIRKARREHVLKGLWWGNYLDVELAYKTARQKAGSRLRFQRTGPEGRVSVWFQHGLPTSDVWGKDSRLTIARVPEEAWTSDVRSVRRRLARTRVWLRAGSNPDRSPRLIEAEMVMHRPLPHGLIRHASIIRERIASHYRHRLVITVAVQDIPTRDGREVGIDIGWRLFEDRLRVAVAVDEENQLEELSLPQEMLGGFAQVRDLQAVRDTHFNGAKAMLAAFLHTAQMPDWLRDATSTLTQWRSQGRLTALALQWRDRRFKDDAVYAMLEAWRKRDKHLWEWQANLRDKLLARRREMYRLWAISIARRYGTVVIEEFDLRRIVSEDNIDVADRMRFIAALSQLRSILEHTCAREGVRIVKVPASYTTQDCAFCANREQFDARKEVRHRCSKCGAEWDQDENAARNLLKRAKGSQVSRKEV

SEQ ID NO: 111 - protein, 593 aa, Unknown
  Description of Unknown: aquatic-freshwater-sediment sequence
MAVEAQFRAAQWYRNRLIEITNKSREKYQQLMLRIPEIARLQETIDADKALKESLREEIKVASAKARKNVPLRPGLREQIASLTKAIKENALTLRAAKDKAKAQIAEETNALYAETAAEQKALYNEAGQPGEIVHRKEGHPDIREPRVPLAWGTRLLMNKAHEQACSTGMPLKVRHDPVGRIGVQLQKGRTISQIFSGKDGFLRIEPVPDDTWDPRPQNAPKKGERLTREQHKARKGTGGKTKSRTRVHLNIGEGRGEDRPFATFPITLYNRKLPVDGKVLWAWILRERIGTRMEYKLQLSVESNTFKCESDGHGAIAFDIGWRVRSKNNLRIAYWFDDYGQSGEILLPEIIPSGLAKADSLQAIRKRKFNRMRALLSKAKADAIKTGMAIPPALLTETETLSAWRSEDRLRRLVKHIWPNHRFAGDERWFNIAKNWLHKELHLYQWECDERQQAIARRTNFYRHTALEFARKYQTCVFENFKLTRIAVKEPVESEKADTPSNIQHNRVVSALSDFRDAFKNKMIFAKVPMEFTTIVCHNCRHPEKFNAAKELIRTCPKCNTTWDQDLNAAKNILSRFHCEGTSGTDMGVQAA

SEQ ID NO: 112 - protein, 543 aa, Unknown
  Description of Unknown: aquatic-freshwater-sediment sequence
MSGEEFLLDQLRARVDYWNRLVEIERDFQAEKEQLLSAASAEMEQLATYIALTDGKLTEALSAGARARSQARTRRTPEPLAAEIAELRDRLRELRKQYREVRRTTFGNEKVKAALRTLGSERTAVIRKARREHVLKGLWWGNYLDVELAYKTARQKAGSRLRFQRTGPEGRVSVWFQHGLPTSDVWGKDSRLTIARVPEEAWTSDVRSVRRRLARTRVWLRAGSNPDRSPRLIEAEMVMHRPLPHGLIRHASIIRERIASHYRHRLVITVAVQDIPTRDGREVGIDIGWRLFEDRLRVAVAVDEENRLEELSLPQEMLGGFAQVRDLQAVRDTHFNGAKAMLAAFLHTAQMPDWLRDATSTLTQWRSQGRLTALALQWRDRRFKDDAVYAMLEAWRKRDKHLWEWQANLRDKLLARRREMYRLWAISIARRYGTVVIEEFDLRRIVSEDNIDVADRMRFIAALSQLRSILEHTCAREGVRIVKVPASYTTQDCAFCANREQFDARKEVRHRCSKCGAEWDQDENAARNLLKRAKGSQVSRKEV

SEQ ID NO: 113 - protein, 610 aa, Unknown
  Description of Unknown: aquatic-freshwater-sediment sequence
MAICKVYRYGLLPPTENRDLVLKTLRLAHEYRNKLVEIDRQERAEIRAVQTSHGSIPALAAAAKSAIQAKETAYQAIKAHKAQDRTRKVPEPLKATYEAAKAAASAASQALWQARAALRGDPTVAIRRDEISLRYNEKRKAARAASGIYHGTYMRVEAADQQARKMTPLWDGVEPSDVKFARWRGDGGVGLQMKEKPGPADLPTSRWCRIEPRGAPKGADPSSKRSAKRRHCTLALRVGSEEREPVWARWPMVMHRPLPEDGEILWVTVTLRHVGPRQEWVALFTVRHEDKRQVPPAEPVDRVGVDIGWRKLEGGGVRVAAWRTDSGAEGELVLDEHTLGQLRKADDLRSIRDKNLEAARAALVAAMPGMSLPNWFPKNVWQWRAQARFSNLAKRWKQNRFPGDDLPYAQLEAWRYHDHHLWAWETSQRTKALRHRLDVYRVFAARMARTYTGLVIEDWDMRDTAEKPDAHEQEGDNEQARSNRVKSAVSELRRALVQAFVNVAKVPAAYTTQTCSACGAIEKWDQAAELEHTCSACGAQWDQDYNAARNLLAYVEQPGGPDNGGVARDEKKPNDGAEVQESKWAKAKRMGKEKRDRVDTARNTVPSAAE

SEQ ID NO: 114 - protein, 547 aa, Unknown
  Description of Unknown: aquatic-freshwater-sediment sequence
MFGHTSDPSLIFRYGALPPVEDGPVLEQMRAAHRYRNKLVEIERDRREKAAAIVSAASPDLAGLERQYAELGEQVESAAAEIKATNQRARKQRATLEQRAKLRTLRAERAEVYARLKEAKHTVYHSLAARAALDQLDAVTLDATKAARATCSVYWGTYLQIEAGLGSIRKGPPPRFLRWTGDGKLAVQIQGGMSRQEAEVGDSRLKIATLERRGKATNVYLRIGTDEMRNPIWAIVPVIFHRPIPDDAQIKWVYLLARRVGTHTRWAVCFVLSRATGWGKPDLATDGAVGLDLGWRILDHGLRVAYWCGSDGAGEEIVLPLRDVSRWQKADDLRAIRGKNFDAARDELALWLAGRDLPDWLIEQTRALRQWRNATRLAALAIHWREDRFTGDEEAFAPLEAWRTQDKHLLEWEANQRRKAVAWRDDFYRRVAADLSRRYKTLVIEDCNWREMGRLPEVGESNESGRAGSYRVIAAVGSLARVLRERFAETVSADPAYTTQRCHVCGQLAQAETRTSVWVKCNHCGEAWDQDRNAALNLLSAASGAVT

SEQ ID NO: 115 - protein, 566 aa, Unknown
  Description of Unknown: aquatic-freshwater-sediment sequence
MPRTRSKALPTKVYKYGCSAPLENQELVKEQWRLANRYRNALLENSLQWRSACQAVVSAEDTELRDIDTCIDILNVNIDSLISEKKKRNSAARKRLKHPDLEAKITDCKTERKRLYARRKLVKDIAYRSPGNKQALDAVHQAFKAANREARKIASKSGLGWGTYLQIEDSAKNFAKGKPAKFKRFDRDAGGSIAIQIQTPQGAPHLTVDRLLEGKDNRLQLIPQPDGIHALVRLCVGGVDMSQRRSANNPPCYVTVRMNMHRPLPPDSHITWVKLIARRVGLKLKWDVHFTVARGSGFAPTIGSGVVGIDIGYRHLDDGSLRVAAWAGSDGRHGELILPATLVRALTRKQELQALRDEKFNVVRASLVEWCKHVSIPDWLKEAASTLALWRSQKRLHTLAQQWSQNRFTGDSSMYIVLDAWRKEDRHHLAWLANESEQGICRRKDIYGKFVAELRRHYGTVGLEDIDLREHAQADNLSKGVQNQRSIAAHSTLRSLLSTMQVIKVPAANTTRRCHYCGHINNVGTDVGYYCDDCGWTGDRDYNASQNILREATYSLRAGGRSHVAT

SEQ ID NO: 116 - protein, 620 aa, Unknown
  Description of Unknown: aquatic-marine sequence
MPVKSKMKGDGRIYAYRASLPTKNLEIVQEQLYLVHKYRNRLVELELNRRSQVDQALRDLVPDLEPTELALKQLDDQIAAAKDAQKKANIKQRGRKVAKSDRDALKDLKAQRKVLYQKRKQLRKDTFSSTAWKSRQTQIENNAKVESKAARASCGLYWGSYAPVEEAARAFRRGAPPRFHRWTGEGKLAVQMQAQAGKPDFTPDTLTSCSSNLLRLELRPEGIWVDGKRRPKKLGNALLWFRVGSTTVKPKRQPIWAEVPIKLHRPLPSDCKIKWCYLQRRKRGTKTIWEVCFVLQGEHGAFDPGDQASEGHVGIDVGWRKYEDRLRIAVYSGSDGQEGELCLPDWWLGESRRVERIRGHRDKLLDAAKTELKAWIKGRESLPDWLTEAGKHMHQWRSASRLAGLCLRWRGELIKPTTDGAAALASLEAWRERDKHLYEYEAHLRAQLQGSRKDLYRKFAAMLSRKYATAYIEDLDLRKFHQLRAIEEGGDKGTDSIRAYVRDACLSELFDAIKSRFRHHVKVDPANTTKQCHACSVVDASWVDHAKVDHECSSCSVTWDQDTNAARNLLNSGDEPVTQFGGPALAPVLVHTYTHKGPNRARRRARRRRALEKKRLNDAA

SEQ ID NO: 117 - protein, 479 aa, Unknown
  Description of Unknown: aquatic-marine-aqueous sequence
MRVYKYRAYAPIVGAGIFDAQSRARHRYQNQLIEIERAWCGLDRATKKDPEAQARRKALVKAARQDAARRGLAWGSYNGASDDVRRAVSALRGAARDEGPRFRRFDGGGRIKVQQQPGARVVVIDGDRVTFRLGHQGAVTVPVVMHRPIPPDATIKEAQLHRERVADKYKWWVTITVAVPAPPPAPPRGVVGIDLGWARRGGKSERDGRRVAVASFADGRELQVRCPESILAKIDHARGLRSLRDVKFNVAIAWLREHVCEHGAPEWLRAALRWSHAWRSQAKLAAVVLRWRDARYDGDDGIYQTLEIWRRRDKHLWTWEVHETRKALAQRREIYRVAAAYIAEHAGEVRVEDIDLAEMAESDDLPRAARRGRVDTAPSTFLAAVKNACSSRGVTYAVVSAKNTTRKCSGCGVVGRSVVGDTFACGGCGLVADRDANAARNIAASAPEAPREPKPKSADLRRAGKARHDAARAAAVKAA

SEQ ID NO: 118 - protein, 481 aa, Unknown
  Description of Unknown: aquatic-marine-aqueous sequence
MDVRVYKYRAYAPIVGAGIFDAQSRARHRYQNQLIEIERAWCGLDRATKKDPEAQARRKALVKAARQDAARRGLAWGSYNGASDDVRRAVSALRGAARDEGPRFRRFDGGGRIKVQQQPGARVVVIDGDRVTFRLGHQGAVTVPVVMHRPIPPDATIKEAQLHRERVADKYKWWVTITVAVPAPPPAPPRGVVGIDLGWARRGGKSERDGRRVAVASFADGRELQVRCPESILAKIDHARGLRSLRDVKFNVAIAWLREHVCEHGAPEWLRAALRWSHAWRSQAKLAAVVLRWRDARYDGDDGIYQTLEIWRRRDKHLWTWEVHETRKALAQRREIYRVAAAYIAEHAGEVRVEDIDLAEMAESDDLPRAARRGRVDTAPSTFLAAVKNACSSRGVTYAVVSAKNTTRKCSGCGVVGRSVVGDTFACGGCGLVADRDANAARNIAASAPEAPREPKPKSADLRRAGKARHDAARAAAVKAA

SEQ ID NO: 119 - protein, 664 aa, Unknown
  Description of Unknown: aquatic-marine-deep subsurface sequence
MGGKAGTVKTAKKHKHRWVEDLEKDLIENCSCGKSRKSQNSSVIVYGLGKPMFDEEGSECPSCNEESNGEPCGAHRFIDQMRLGHSYGNKLTELYRASSERYREIIGSASKKMEVIVMKLDDLDDQIKGLNALLKADKDNKEAKKLKKELTADRKIIRADRKELVEKLKQNKIIQARLKKNNIKLNSEIIKARGEFSKLGLMWGTYNLHEASAKQAQYAPGRRGDPEFKRWEGHGRIGVQLQGGLPESKVWGDSRSFQIDKVDHETWSKLREDGSPDRAFRRKQCRTKVRVRIGSAKAKPIWVEFPMTMHRPIPEGADIRDVTILQKKSGTIYRYSLHVQINENKTNQPERSGVVGVNLGWRKHQDNTLRVAYWYGDDGRYGEYLLDSEYLEKVKVMDGKQSKRSMALDVIKETFAVWLDGQDNLPEWIQEWRGIKFIRDWRSSSRLASLVLRWRKNRFDGDALIFENLEEWRRADKHTCNQEGGIRNKNQLRRQDEYRNFAAFLARTYGKVVVDDTNYANLARKPGPEDDDNKVARKQANLASPGKLRVNIKNACHKHGAIYVAASSKHITATCHKCGTINDWDKSLSLTHWCSGCNAFWDQDMNAAINLCRSGGGKPPNFEHPGDARIELNDEVNKYDWLIQESAGMAGSKKQPIENLAVTL

SEQ ID NO: 120 - protein, 572 aa, Unknown
  Description of Unknown: aquatic-marine-diffuse hydrothermal flow volcanic vent sequence
MRERARNWPVMVFSYGILPSFLKEEAAINILKEEAYRMNELWNKLVEIGRKYLETYSSNIEEDPAIAPLISQRKEIENTLEETDKQIKQLRIKLKTKKHPALAELEEKKRELRRQLREIKASIRETKKQVKEKYREVFAQMEEEVKEAVKKAPLYWCNKEVVRDKFWAAWRGVKNGNIPKFHRFDDRWCLTWRFTGGGMPVKDAFRKVLSGIVPPEVYKLPTKKRNKMANLTCLFRQGEYRILVPIILHRPLPEGGYIKRVTFVRRPYGRDRVRLFLNFTVEVPPDKYYLPVREERKGKIAALELGFRKVDGRIRVGVLYDPFTEEKFREIFIPQNIPERLEKVRKGQSKADEELEDIKNDLSKWLVEPQVLPKLPEEIKKLITNRVAWVKTRDRGVWKVINLLKESGADPAAARNVERRMLKREKFLNDLQRTRIKALGARKRFYENLAKEIFDRYEMLIIKDISLKKLALKEMAEQLPDEARWVRFVAALGELVGCLERRAERTKGVLVKLDPAYLTRTCHICNHINNPNRPEKLFWTCEKCGTKWDQDKNAAVNLYEQGIERLKLAQTG

SEQ ID NO: 121 - protein, 551 aa, Unknown
  Description of Unknown: aquatic-marine-freshwater to marine saline gradient sequence
MRLGHRYQNDLIAIERGRRLAFAAVMSSDTRIAEAEAKITEIDAKISEAVERARQARVARRTKADTEQTKSEIRSLKASKAAAVLDLRAIKPLVQSELRPRIAEVDARAHELQISARAHCGVYWGTYLLAEAAAEQAAKTTKGELRFQRWDGSGQVSVQIQGGADVDDVVGDSDTRLRWPEYVEGTRKAKRTELAMRVSSEKGVPVWARWPMVYHRPLPTNARIKRAIVSLRMRGPREEWSVEVTIDASTCRLRDRPDGGKVAVHLGWRKEPSGNVRVATWLGDDGDAGTIECPERVLTGFAKCESLRSIRDRNLDELRARLVLAREGWPVWLRDATSSLYQWRSPGRFVALAQRWKAAGVAPEHASDYGAIEAWRYNDHHLWRWEHDQRLNSTRYRREVYRIAVAELSRRYRRAILMAADWAEMAKLPGIGEGAPDLPDEARAQRVETAPYVLTEALHSAMTEVVWVDPSYLSQACRHCDHKDTGDTWVRECTSCGKARDIDEAAVRTMLDLEEAGAWSWKKGGAKDESGKVREIRAPKWAKKHATEAAE

SEQ ID NO: 122 - protein, 574 aa, Unknown
  Description of Unknown: aquatic-marine-freshwater to marine saline gradient sequence
MTTRVYRYGLLAPTENSELVRQQMRLGHRYQNDLIAIERGRRLAFAAVMSSDTRIAEAEAKITEIDAKISEAVERARQARVARRTKADTEQTKSEIRSLKASKAAAVLDLRAIKPLVQSELRPRIAEVDARAHELQISARAHCGVYWGTYLLAEAAAEQAAKTTKGELRFQRWDGSGQVSVQIQGGADVDDVVGDSDTRLRWPEYVEGTRKAKRTELAMRVSSEKGVPVWARWPMVYHRPLPTNARIKRAIVSLRMRGPREEWSVEVTIDASTCRLRDRPDGGKVAVHLGWRKEPSGNVRVATWLGDDGDAGTIECPERVLTGFAKCESLRSIRDRNLDELRARLVLAREGWPVWLRDATSSLYQWRSPGRFVALAQRWKAAGVAPEHASDYGAIEAWRYNDHHLWRWEHDQRLNSTRYRREVYRIAVAELSRRYRRAILMAADWAEMAKLPGIGEGAPDLPDEARAQRVETAPYVLTEALHSAMTEVVWVDPSYLSQACRHCDHKDTGDTWVRECTSCGKARDIDEAAVRTMLDLEEAGAWSWKKGGAKDESGKVREIRAPKWAKKHATEAAE

SEQ ID NO: 123 - protein, 600 aa, Unknown
  Description of Unknown: aquatic-marine-pelagic marine sequence
MISRVYKYGAVPLKKFPEVKFPREQFPEEGVEELRRANKLRNSLVWLHRKNNEKFEAARVAADAEYGEIAEKLDALEKTISQALTAKRQARAKAGTRDAKHPLVKAASETINELTKQRSDLWKALKPARIRADKRVDRKALTKQFDDAVKVVQHVKETGGLSSHCANEIVRYFKESRSRALNERATLRYRRFDGTGFWFYRFREPGVNKNGVDFDGLLTGNKTEARDNRNFVLTEKSRRGKRVIYKLRAKIAGGAKKDSKVYGHFDLILHRPIPENARIQSAKILRHRTGDKFTYTVSFTLKLPDVEQQTVEGSVLGLDIGFREMERNNSYRIATLATNDQSRRVETIDIARENRRGFLARMNHIDDLRSTMDENATELGKKLLPLLKTAKPLPDSHQQFIFTERLRKTRANVTLDFERSYKMARWFIRAPDEADFYGPEIVGMVLRWWEENSFKYREMHNLRRKALAERKEVYRMEAARLVGFGIPIAVEKLDMSKWAERKDSDNELSNRALSSRFLVAPSELIAAIENAAKREGVPFIKVNAANTSKACHACGTINKALKGELIWTCEECETKHDRDINAAINIAKRGILQAKKEKKQ

SEQ ID NO: 124 - protein, 642 aa, Unknown
  Description of Unknown: aquatic-non marine saline and alkaline-hypersaline lake sediment sequence
MTKTYVYGLPLGPTVNADLVEEQMRLAHKYRNALIEIERERREKVREVYDERDLALEGLVEEDKVAKSELKRATEDLKRQRAKTRSRSDTAEQRARVKEARKAAQEVAKRLSEARKELKLDEELQKRLSEANLTASEKSQAAQQGFSREGLFWGTYLQVDNAMEDSRRDLKMWDEHGQPLDPKFLQWRGDGTVAVQLQGDKHPVEKIFSGEDTFLQVDMEPPPEGVVSKTRRKKRRGVMRLRVGSTKSRGPVWAEFPIIMHRPLPQGVRIKWAVVKRRMISDRPRWTVHFSLGLPAEYQHEEFGSGRGAVAVDIGWRKRGEDQIRVAYLVDGDEYAAYLRDRQDPLGRGDELLMEPEVVRGFDKVESLQSIRALNQNEMQKSLKGWIKSNKKNLPEWFREDVRYLHSWKSPKRYAGLLRKWGEKRWDGDGEGFQILKDWLSGTYEESLGRRDGGDRHLWQWKESQEQKSLRRRKDHYRRVAAKLARKYKVLVIEDFKLTETQKHEPPESEKVEIQAARNQQKEAACYELRMMFVQAFLARGGTVVWVDARMTTQRCFECGCLEPWDAIPEVDHVCVECGAKWDQDANAARNIMRLYRNDETLKMIDGSVPVEPKMSRRQKGRKKGKKIVQQRKSQEAAQPSV

SEQ ID NO: 125 - protein, 732 aa, Unknown
  Description of Unknown: aquatic-non marine saline and alkaline-hypersaline lake sediment sequence
MTRKTSKTKRKKKPGKPRVRGPQLAYVYGLPFGPTKNAELVEKQIVLSQRYNNQCVEAERRLRATLREIYQQHTLDLMGASDEMREAFTEVKRLEKLLREMQEDLRTKRKRSRSRSDTPQERMRLREVRDLKNEAWAKLRELKNGSESDDEPGKEEPRKKVELSDELKARRAEAQQREKQELHEAYVQFKDGTYEKVTETDEELGKLYWGTYLLVNRAREASRMSLRDSLWKWNEEKGIWVERDPKFKSLDDEVIFGVELQKGDSVERVLNCQNTMFQLDMEPEMGEEVLRHRRIRRRGIARIRVGSGGKSGRDPIWAEFPVIMHRPLPPKARIKWAVVKREKITTRLRWTLHLHLEVDSGDCHKDYGTGRGVVAVDIGWRKRGTETVEMGRKRKKRGLRKQEVEVPRIRIAYLIDDREYAAYLKNPDEGEVGHEQCMSSKVVAGFQRVETLQQTRQLKQNEMLAELRAWIKARRSALPKWFRESTRGIAKWEAPKRFAWLLRLWRESRWKGDERGFEILDRWQRGVYDEEARRLEGGDRHLWQWQESQRRKSLLQREDHYRCVDSALAREFKVLVLENIDLSKMQKHELPGSDKVEIRRARRQQKEAALSEFRETLIQAFLSRGGTVVWVNPAMTTQRCFDCGHDAPWDPIPKVEHTCEKCGRTWDQDANAARNMMRLYRENKIVKIADGSVLVREMSDAQKNRNKGKKVVRKRKKEEEERNGEGPAPLES

SEQ ID NO: 126 - protein, 584 aa, Unknown
  Description of Unknown: aquatic-non marine saline and alkaline-hypersaline lake sediment sequence
MRVYKYGLLRPTTNADLVHEQIKIGHKYRNKLIELEIKRRDLIRAEVAKSSVVEDDFTDAKLAVEKFKHLDKLLKQKNAQHRSKRHNNPDLKKDHTKARKEKTKAIKKLEETRRKVLKKCKETIKVFNDQYIEEEKKVRSECAPFWGTYQVIEDAMKRSRKSLPLWDGLESNNPKFRRFNGIGRVSIQLQKDVIDKNNGMNVDLVFGTTDTRLQVAPVPEEAWYSPIRSVRRKKSRTVLKMRIGSEGRAPIWAEWPMIMHRPLPDNGRIKRVTVNFRKIGPREEWTADFFINDSATLHEQYEVSGAIGLDVGWRLMDDGSLRVAFWEDDEGEKGEFRLSPTLMGAFKKADDLRSIRDKNRDEIKEFLIQHFSKNPMPSWMLDFVKGKEDSKRPTNKQACVYLSKWKSIAKLTKLVQTWKEKGITKRHQKAYNRFEDWRYHDFHLWQWETSQRKKAERRRKDNYRVLASKLSKQYHTLVLENFDLRKVARKKAADDDSLDIKAANHNRFVANISELRLVLRNAFEKCGEIELVKAVNTTKICFWCGFINNFDQAKNLIHQCYSCGVVWDQDDNASTNIRRRRKQG

SEQ ID NO: 127 - protein, 654 aa, Unknown
  Description of Unknown: aquatic-non marine saline and alkaline-hypersaline lake sediment sequence
MGAARRRNPKVAAARKGKPPPKATGNCRNYRYGAHEPIANLDKVLDEMRGAHDLRNVLTCINRARSEMITAALGEHQSYKKATADLAALHQRRDKLEAQIRQQNSASRKRLGRHSPLSSELDTVRKRIDEGRTALKKLRRKLLKKDPALKAVVEAADDMAKRETTRAEDACGLYWCTRNEQTGKRAKLRRFKKWRDSEATISVQIPGGLTVEQLLGGENNQARLELRPEGVWVQGARKRKVEPAEAARNKLRLDEDGYPMRKLGTAILHLRCMSDEDGKPIWAEVPITYHREIPADAKIKRCYLHRFRVGNRYHWSVRFSLERGKKGDDSWLHPRVATTGTAAIDIGWRWFPDRLRVAVWAGSDGAEGELCLPKWWLDEMYSVRLDQRERDVLFNEIVSLVLPWFRSRRGELSDYVVQAIKTMHSWRDKGRLAALSMRWRDDLAADPGANPAHVAMSIRLEEWRKRDKHIWCEEVNLRSQLQGSRKDLYRRFAAMLTSRYGRIVVEEFDLSAVQKLPPASIDDGTYSRVKRHKGDAACSHLVGALKDAARQLDKKNPKWTTKRCHVCGKTERKWENPGELEHTCKHCGVLWDRDVNAARNILAASGVAVDWTRPPLAPAARMTYPQVENREMRRSRRRKEALETTRASGDRQTA

SEQ ID NO: 128 - protein, 670 aa, Unknown
  Description of Unknown: aquatic-non marine saline and alkaline-hypersaline lake sediment sequence
MLKRGERGERGERGERGERGERGASMPRNPKKKMDGVGRNYKYGAYAPLTNEDEVRWQMVLGHRYRNRLVEVELDIRAKRDAIIQEVAPGLLALEDEINKMGEIIALHEKAQKEQNKKQRGRDVHPGVANLLRDLKAEKKGLVGKRKALKAELFASDRWKQDGGDHLNQQRKEGRSNAYSEYKDEGLWWGVRSKILRESGSFISGAPPKFRGWHKSVRSTRFVVQTQGGLTEEELLSGRNTTARLTLFPDGVWAEGKRRPKRMGDAILDLRIGSDEHRKPIWTSIPISYDRHLPAEAKIKWIYLFKRLLVDKEKWEVVFALECPAAADYDAIRRRGGDKKRTNRNRKGIRLRKYAQSGVVAIDVGWRKFEDYLLVGTCAASDGREWELRLDGNWLGQLRRVEGMQSYRDVLLNEQVKWLHPWLKSRKGSLPELLLPPSRNLEKWGQRSVARLVKQWMRERPIGTLDEQRALARLDEWLSRENHVWHFQANLQHQLLLYRREEYRVWARRIGEVYRCVVLEKLNYGDWHKKPPVERGGSVKADMAKKYLRDAGLSHLKNALKGGVLQVADVPHEGTTVNCHACGHADVWEDPAAKDHVCETCGLRWDRDVNAARNILAASGVTVAWEREPLAPTEAWTACSKSGLNRAQRRAISSSLAIDSEIALAVGGSE

SEQ ID NO: 129 - protein, 645 aa, Unknown
  Description of Unknown: aquatic-non marine saline and alkaline-hypersaline lake sediment sequence
MPRNPKKKMDGVGRNYKYGAYAPLTNEDEVRWQMVLGHRYRNRLVEVELDIRAKRDAIIQEVAPGLLALEDEINKMGEIIALHEKAQKEQNKKQRGRDVHPGVANLLRDLKAEKKGLVGKRKALKAELFASDRWKQDGGDHLNQQRKEGRSNAYSEYKDEGLWWGVRSKILRESGSFISGAPPKFRGWHKSVRSTRFVVQTQGGLTEEELLSGRNTTARLTLFPDGVWAEGKRRPKRMGDAILDLRIGSDEHRKPIWTSIPISYDRHLPAEAKIKWIYLFKRLLVDKEKWEVVFALECPAAADYDAIRRRGGDKKRTNRNRKGIRLRKYAQSGVVAIDVGWRKFEDYLLVGTCAASDGREWELRLDGNWLGQLRRVEGMQSYRDVLLNEQVKWLHPWLKSRKGSLPELLLPPSRNLEKWGQRSVARLVKQWMRERPIGTLDEQRALARLDEWLSRENHVWHFQANLQHQLLLYRREEYRVWARRIGEVYRCVVLEKLNYGDWHKKPPVERGGSVKADMAKKYLRDAGLSHLKNALKGGVLQVADVPHEGTTVNCHACGHADVWEDPAAKDHVCETCGLRWDRDVNAARNILAASGVTVAWEREPLAPTEAWTACSKSGLNRAQRRAISSSLAIDSEIALAVGGSE

SEQ ID NO: 130 - protein, 625 aa, Unknown
  Description of Unknown: aquatic-non marine saline and alkaline-hypersaline lake sediment sequence
MGNVPLLEQQTKEAGERVSEASKSVKQYRSKNRTRKVPEWMRTELDAARLAKKDVAAKLREVRKQLRTPEIQAEMDRINGLAGELRRSARAHCGLYWGSYLLVEDEMASSSKSPLYDKENPNEPNDPGFVRWHGEGHLGVQIQGGMPTGLVQFHSTLLQIKKVDPVEGKLGKSHYLLRMRVGSNGRKPIWGEWPMVMHRPLDPGQIKGAAVSCRRIGLRWQWTVEITVDKESGCRPRPCGYGQVAVNFGWRKVDGGIRVAYAVDYEGNEQELVLPDGEAEGIVRPSRVRERLTDEQRAIQKRDGIIYGKACRLSDDGKSYEAEKVLSGRPDLLSRLSSRVRPARKPPILPALRKSDELRSIRDQRFGHILQSLIKWLKTIEVPCWLKDRTSHIHKWKSQNRLRKLIGYWRSNRFDGDETMFQSLEVWNHRDEHLLSWEDSQRKKSQRRRRDLYRVWAAKLADRYYTIVLNSHDMAETARKPKVEATDDIPLSRSNRQLVSPSELKEALINAKRSREGQTVENPAQKVTHTCHNCETEQDFDAASSIEHTCLACGETWDQDRNAAINSLRWFVERPSDAKILGTARKIKNLDENGVEKETRRQRISRLKREKDARMKALANDAASS

SEQ ID NO: 131 - protein, 645 aa, Unknown
  Description of Unknown: aquatic-non marine saline and alkaline-hypersaline lake sediment sequence
MPRNPKKKMDGVGRNYKYGAYAPLTNEDEVRWQMVLGHRYRNRLVEVELDIRAKRDAIIQEVAPGLLALEDEINKMGEIIALHEKAQKEQNKKQRGRDVHPGVANLLRDLKAEKKGLVGKRKALKAELFASDRWKQDGGDHLNQQRKEGRSNAYSEYKDEGLWWGVRSKILRESGSFISGAPPKFRGWHKSVRSTRFVVQTQGGLTEEELLSGRNTTARLTLFPDGVWAEGKRRPKRMGDAILDLRIGSDEHRKPIWTSIPISYDRHLPAEAKIKWIYLFKRLLVDKEKWEVVFALECPAAADYDAIRRRGGDKKRTNRNRKGIRLRKYAQSGVVAIDVGWRKFEDYLLVGTCAASDGREWELRLDGNWLGQLRRVEGMQSYRDVLLNEQVKWLHPWLKSRKGSLPELLLPPSRNLEKWGQRSVARLVKQWMRERPIGTLDEQRALARLDEWLSRENHVWHFQANLQHQLLLYRREEYRVWARRIGEVYRCVVLEKLNYGDWHKKPPVERGGSVKADMAKKYLRDAGLSHLKNALKRGVLQVADVPHEGTTVNCHACGHADVWEDPAAKDHVCETCGLRWDRDVNAARNILAASGVTVAWEREPLAPTEAWTACSKSGLNRAQRRAISSSLAIDSEIALAVGGSE

SEQ ID NO: 132 - protein, 674 aa, Unknown
  Description of Unknown: aquatic-non marine saline and alkaline-hypersaline lake sediment sequence
MIVYQYGLRAPTSQIELIHDQLWLSHRYRNTLVEIERGRRAAVRRLNSTVGNVPLLEQQTKEAGERVSEASKAVKQYRSKNRTRKVPEWMRTELDAARLEKKDVATKLREVRKQLRTPEIQAEMDRINGLAGELRRSARAHCGLYWGSYLLVEDEMASSSKSPLYDKENPNEPNDPGFVRWHGEGHLGVQIQGGMPTGLVQFHSTLLQIKKVDPVEGKLGKSHYLLRMRVGSNGRKPIWGEWPMVMHRPLDPGQIKGAAVSCRRIGLRWQWTVEITVDKESGCRPRPCGYGQVAVNFGWRKVDGGIRVAYAVDYEGNEQELVLPDGEAEGIVRPSRVRERLTDEQRAIQKRDGLIYGKACRLSDDGKSYEAEKVLSGRPDLLSRLSSRVRPARKPPILPALRKSDELRSIRDQRFGHILQSLIKWLKTIEVPCWLKDRTSHIHKWKSQNRLRKLIGYWRSNRFDGDETMFQSLEVWNHRDEHLLSWEDSQRKKSQRRRRDLYRVWAAKLADRYYTIVLNSHDMAETARKPKVEATDDIPLSRSNRQLVSPSELKEALINAKRSREGQTVENPAQKVTHTCHNCETEQDFDAASSIEHTCLACGETWDQDRNAAINSLRWFVERPSDAKILGTARKIKNLDENGVEKETRRQRISRLKREKDARMKALANDAASS

SEQ ID NO: 133 - protein, 645 aa, Unknown
  Description of Unknown: aquatic-non marine saline and alkaline-hypersaline lake sediment sequence
MSRFHKDRLKVDAKIFSFNASEPMEGLEVIRSEMKLAHDYYNKLVELERARRSEIEEEQLRRFPELLRIEEEIAVAEDSLVDLVRETKRRNSSRRSAKLPKEDRERIKIARGVLRELCKRRSEMKKGLRENADYQEAEKGITKKAKGAAKEARHESGCFWPNYLQVEVAVESAKKPRKRRKGQRPVRWTYRPRFKRWEGRGRVSMQLQKGLSPERLESGADTRLRLVRGRVTKPGPRRERKQGTAMLWIRVGSTKEPGKRAQPVWAKVPFYYGGKRDRELPPDCSIKWCWLLVDKIGLKERWRVQFSIDAPLGTLKHVDRASDGTVAIDIGWRLMGDRLRCAIWSGSDGEEGEIALTGSWVRAYSRERAMRSYRERLFNCVLKELCSWAKEQEVLPEPLAEARALHAWKKHGKLASLSLKWRGKRDFRERSEKAASYLREGGVVDLSGASEDDVLALLEGWRKRDKHVLEYESHLRDKLQATRLDLYRVCVANLRRRYKTCVLEEDVEDDERTKLMDLVKWHLLPDVIEAGDPGEEEQRRASKRGLRPACLFKLRAILKENMEIVGVPSEFTTKRCWSCGSVEEWDQASEVEHTCENCGETWDQDVNAARNLLVASGVEATFFRPALAPAEVWTCGLRGTFPEPV

SEQ ID NO: 134 - protein, 556 aa, Unknown
  Description of Unknown: aquatic-non marine saline and alkaline-hypersaline lake sediment sequence
MFGHDSLPSRIYRYGAKAPTVGAENVDRQMSLGHRYYNTLVEIERRRREKAAALVARVSPALASLEQRREALTAAIAERREAVKKSNQEVRKKQATKDERDAIAALTAERKEVNVLYRDAKDLAYNSPEAAAGLAAIDQQADMEAKTARAESGLYWGTYLQVEQSLPRKGPPPKFHRWMGDGKIAVQIQGGMTLEEAFAGRDQRFRLEPIPDNAWDKGNRKHRRTRAWIRVASDGRDPVWAVVPVVLHRPIPDDAQIKWVYLLRRRVGCNNNWSLCLVISRQAWQRHDLAGDGAVGINLGWRKVEGGIRVATWVGDDDESDTLVISERDAGRWQKAKDLRSIRDGRFNAIQEALVDWLGSHAVPEWFSERTATIKQWRSQARLAALVIAWRSQRFEGDEGIFPAMEAWRKKDKHLYEWEANQRRKAVAWRNDLYRCFAAKLSQRYETAVLGKTDWKTIGRRPSPENPEHASGGENRTLASPGILQRMIVERVARVELADAKHITQRCHACGKLASFDARTNIFTTCRHCAETWDQDENAARNLLLSASGPVAQKTP

SEQ ID NO: 135 - protein, 572 aa, Unknown
  Description of Unknown: aquatic-non marine saline and alkaline-hypersaline lake sediment sequence
MRVIVYEYGLRQPTSGIDDIDDQIHRAHRYYNKLIEIERWRRAQVKKAQLQVPEVANTKKVVEALREDLEALRTQHKRAKSHDGKTHPPRAGAIKDTTAALKAARQGYRQAKKDAADILKPLYKKVDEERNALVRQARGESGVYWGTYLCIEQFASQAAQTAKRESPDFRRWTGDGMLAVQIQNGLDAGALFGDDTRVQVAPIDSKAWDKSISRGKRKRMQYTTLRLRVGSTGPGNREPVWAEWPLFMHRELPADASIKWVRVIRRRWDQRWKYRWVVQFTVEVPEAPGWQGEGTRKGMVAINLGWRKLATDALRVATWVDTEGNVGELQLPVSFRQRLEKANSIRSIRDRKLDELKAAIVPLLPECSRWKSPKRFEGLLRQDDLPDGVRDLVNKWAYRDRHLWWFERGCRQGALRYRREIYRLFALEMAKKYPLVIVEDYDLRPIVTDENRIKLPSHQRVEGSPSEARHVLLASVSRLGGMVIDGKSKLATQECHLCGYGKEKDERWDASPKIEHTCVGCGENWDQDVNNARVLLARAQVMLESGELLAQPKPKRSARFAKKHKKQNEAVL

SEQ ID NO: 136 - protein, 556 aa, Unknown
  Description of Unknown: aquatic-non marine saline and alkaline-hypersaline lake sediment sequence
MFGHDSLPSRIYRYGAKAPTVGAENVDRQMSLGHRYYNTLVEIERRRREKAAALVARVSPALASLEQRREALTAAIAERREAVKKTNQEVRKKQATKDERDAIAALTAERKEVNVLYRDAKDLAYNSPEAAAGLAAIDQQADMEAKTARAESGLYWGTYLQVEQSLPRKGPPPKFHRWMGDGKIAVQIQGGMTLEEAFAGRDQRFRLEPIPDNAWDKGNRKHRRTRAWIRVASDGRDPVWAVVPVVLHRPIPDDAQIKWVYLLRRRVGCNNNWSLCLVISRQAWQRHDLAGDGAVGINLGWRKVEGGIRVATWVGDDDESGTLVISERDAGRWQKAKDLRSIRDGRFNAIQEALVDWLGSHAVPEWFSERTATIKQWRSQARLAALVIAWRSQRFEGDEGIFPAMEAWRKKDKHLYEWEANQRRKAVAWRNDLYRCFAAKLSQRYETAVLGKTDWKTIGRRPSPENPEHASGGENRTLASPGILQRMIVERVARVELADAKHITQRCHACGKLASFDARTNIFTTCRHCAETWDQDENAARNLLLSASGPAAQKTP

SEQ ID NO: 137 - protein, 630 aa, Unknown
  Description of Unknown: aquatic-non marine saline and alkaline-hypersaline lake sediment sequence
MYRYGLLPPSSGAELVDEQMWLVHRYSNELVEIERARRKGFHAALAVVPEVAEALRVEEEALARYHVLRDSDSDDRAAEFRKKGKRRRKSSPAVADALAALKAATDAVEDVRAAAVKAIGRDSKKKKTAKKKKKKKTATELVKMTPAEVASVTEAINENDAVHGDAAKRKRAEFIAQGLYWGNYQVAEASIPRKGPPPKFRRWEGRGHIAVQIQGGMTYAELLSCNHTMARLEIRDDWGSNRRTSRHGLLWIRVGSKGKGGREPVWATFPVCWHRHLPEGARIKRIDVTRRIQGVRAVWAVCVTVQTPGASLTKQALVKPVTKALPKAVGLDVGWRSTDDGGIRVAVLYDGDRHYEVALPHWFAEGDRLVSDLQSIRRCRFNAVKDQLLAALREGKHKEQAETFATLASWDSQARLARAVREWEGCPAYLTEWRAKERHLYQWERDAKRYLVEWRKNWYCHWVAWISQRYKNVVIEKFDIAKIKKKAEAGEDKEEATGPHSLAAPGELRRILLSTCSREGVQVHLAPAGNTTRKCSVCGKLRRKKKGEGVALMQECSGCGRVMDQDANASRNLYGFASAGVIPETPVAFAVPEAAWYGRFSLTPKKIQSRVARLQAALETSPPDSDGKGG

SEQ ID NO: 138 - protein, 643 aa, Unknown
  Description of Unknown: aquatic-non marine saline and alkaline-hypersaline lake sediment sequence
MAFHHSTQPTTSRVYRYGLLPPSSGAELVDEQMWLVHRYSNELVEIERARRKGFHAALAVVPEVAEALRVEEEALARYHVLRDSDSDDRAAEFRKKGKRRRKSSPAVADALAALKAATDAVEDVRAAAVKAIGRDSKKKKTAKKKKKKKTATELVKMTPAEVASVTEAINENDAVHGDAAKRKRAEFIAQGLYWGNYQVAEASIPRKGPPPKFRRWEGRGHIAVQIQGGMTYAELLSCNHTMARLEIRDDWGSNRRTSRHGLLWIRVGSKGKGGREPVWATFPVCWHRHLPEGARIKRIDVTRRIQGVRAVWAVCVTVQTPGASLTKQALVKPVTKALPKAVGLDVGWRSTDDGGIRVAVLYDGDRHYEVALPHWFAEGDRLVSDLQSIRRCRFNAVKDQLLAALREGKHKEQAETFATLASWDSQARLARAVREWEGCPAYLTEWRAKERHLYQWERDAKRYLVEWRKNWYCHWVAWISQRYKNVVIEKFDIAKIKKKAEAGEDKEEATGPHSLAAPGELRRILLSTCSREGVQVHLAPAGNTTRKCSVCGKLRRKKKGEGVALMQECSGCGRVMDQDANASRNLYGFASAGVIPETPVAFAVPEAAWYGRFSLTPKKIQSRVARLQAALETSPPDSDGKGG

SEQ ID NO: 139 - protein, 651 aa, Unknown
  Description of Unknown: aquatic-non marine saline and alkaline-hypersaline lake sediment sequence
MSTKVYKFRLYAPILNGDLVEEQLKLANAYRNKLIELERDRRVVARELNAERRSVLGEYIDAAEELKTRLKREVNRLKAMKAMKARGARKSPELKDQEKLVTQIRQERKAAVEDLKAREANLKTTSELQAKYDKLWEDLTNKTKEERNLNGLYWGTGGFQEQAMQKSSETLHLGKDPRFKRWDGCGTVAVQVQKPLQMPLKDFFHGKSTLINFIMDDEGASGTKRHGVVQLRVGSDRKKPIWAEWPLVMHREMHERAVITGAQIHKTRTADKFKYHLCVTAKLPDDVRKERCGDGVVALDIGWRKLLDGNLRVAYWKDREGNGGQLVLDPAVLSGLGKDASLQAICRGLLNKLYKAFYTWLSSVANLPENFQQIYEEMTAEKAYWKEFRALQKIVREARAGGLPELDALEEKLAEMKARQKEVRTWKVQGKFSGLLEDWRNNRWDGDNAGFTMLDDWWRGTYNPESGHREGGCKHLWQWRSNQREKSQRRRKHQYRNLGAEFSRKAGVLVLENFDLTDMQRDAEPEEKKKNPEAKLNQRYAACYELREAFIQAFQSRGGRVVKIDPQMTTQICARCGCDTRWDAALEIEHTCERCGATWDQDENAADNLLKLYEGGGSIQEVTVVKKDPRWKRLKAEKAAKLEDRGGARKD

SEQ ID NO: 140 - protein, 633 aa, Unknown
  Description of Unknown: aquatic-non marine saline and alkaline-hypersaline lake sediment sequence
MVTEYTTKVYTCGLRPPAENADLVSEQIRLGHRYYNRLIEIEHEKRQRDHEIVGAHGDADALQAAIDEQVVVVEQVVARIRRWRIANGKKVASKDLRMELAAAKKSLKAARAELRELRRVIKQDPEIAASRVALWAEDSAARKRARAECGIPHGTYIQVEQAVEAACKAPMAPGCETPWWELPRFKRWKGEGCVGLQLQQRDGEYMDTDALFGRSDPRLQIDPVPSTAWDRRRSREQRTVVRMRIGSECRRCGALCTSIHCPEGGDGGAAYRSPVWASWPMILHRPLPEGALIKWAKVKRERIVGKARWRWSLHLTIDEPEQEPRCGEGTVAVDVGWRKTETGMRVGYWQDDSGDHNSINIDHEILDRLRKVDELESIRKRNMNAAKSQLRAWLATWEEVPDWMREASRHMHAWRSQNRLAGLALHWRQNRWEGDNPGYEDLEDWRKQDKHLWAWQDNLRGKVLRRRREVYRVAAARLAERYDTVVLTDFDLRDTQRHPSDTSTREEIDAVKWQQKAAACSVLRGCIRNAFTSRGGRIVEVEAKLMSRTCHGCGHDGEWAKPEELEHTCQGCGETWDRDVNSTTNMLRAARERSDDDDGRPKKRAAKWAKRHGRSKNENDDDGTSRNAGDKVA

SEQ ID NO: 141 - protein, 549 aa, Unknown
  Description of Unknown: aquatic-non marine saline and alkaline-hypersaline lake sediment sequence
MFGHASDPSVIYRYGALPPTHNLDAAFEQLRAAHRYRNKLVEIERDRRDKTAAVVSAASPDLAGLESQYAELGERTAAAAKQIKATNQRARAQRATPEQKAVLRKLRAECKDVYSRLKEAKALAYKSLEARTALDQADAAALNAAKKARAECECYWGTYLQVEQGLSGIRKGAPPRFLRWTGNGKLAVQIQGGMSREEAEHGDGRLRIATTERRGKATNVYLRIGTNEDRSPIWAVVPVIFHRPIPDDARIKWVYLTARRVACHTRWHVCFVLSRAEGWRKPDLATSGTVAVDLGWRLLDHGLRVGYWRGSDGGSEEILLPTRDVARWQKADDLRAIRGERFNGVVDWLAKWLAGRDLPDWLIERTRTLRQWRSAARLASVVIHWRENRFAGDKDGFAAVEAWRKKDKHLYEWEANQRRKAVAWRDDLYRRVAADLSRRYKTAIVEDCNWRDVGRKPDVGENNDSGAAARQRTIAAPGRLKQLLVERFAETVKAEAAYTTQRCHACGELAHVETRTSVWVTCQQCGAAWDQDDNACRNMLDMVAKGPVT

SEQ ID NO: 142 - protein, 642 aa, Unknown
  Description of Unknown: aquatic-non marine saline and alkaline-hypersaline lake sediment sequence
MTKTYVYGLPLGPTVNADLVEEQMRLAHKYRNALIEIERERREKVREVYDERDLALEGLVEEDKVAKSELKRATEDLKRQRAKTRSRSDTAEQRERVKEVRKAAQEVAKRLSEARKELKLDEDLQERLSRANLTASEKSQAAQQGFSREGLFWGTYLQVDNAMEDSRRDLKMWDEHGQPLDPKFLQWRGDGTVAVQLQGDKHPVEKIFSGEDTFLQVDMEPPPEGVVSKTRRKKRRGVMKIRIGSTESRGPVWAEFPIIMHRPLPQGVRIKWAVVKRRMISERPRWTVHFSLGLPAEYQHEEFGSGRGAVAVDIGWRKRGEDQIRVAYLVDGDEYAAYLRDRQDPLGRGDELLMEPEVVRGFDKVESLQSIRALNQNEMQKSLKGWIKSNKKNLPEWFREDVRYLHSWKSPKRYAGLLRKWGEKRWDGDGEGFQILKDWLSGTYEESLGRRDGGDRHLWQWKESQEQKSLRRRKDHYRRVAAKLARKYKVLVIEDFKLTETQKHEPPESEKVEIQAARNQQKEAACYELRMMFVQAFLARGGTVVWVDARMTTQRCFECGCLEPWDAIPEVDHVCVECGAKWDQDANAARNIMRLYRNDETLKMIDGSVPVEPKMSRRQKGRKKGKKIVQQRKSQEAAQPSV

SEQ ID NO: 143 - protein, 560 aa, Unknown
  Description of Unknown: aquatic-non marine saline and alkaline-hypersaline lake sediment sequence
MFGHKADPSLIYRYGAKTPIEHCDVVDAQIRAAHRYYNQLVEIELRRREQATELVRSLSPELDTLTEWREELSETIDSVRAEIKAANQRARRKTTTKAQRDQVKALRKQRKAVTELWREAKAAAYDSPDAKAGLAAIDEAANESRRQARAACGVYWGTYLAIEQSIPKTSAPPTFHRWTGDGRVVVQLQGGMSAAEAFACRDNRFRIEPVPEEAWDRGQPKRLQRTRAWVRVDSDGRDPVWAVVPITLHRPFPEDCRIKWVYLIRRKVASKDKWSLCLVLSRVEGWQKTDLGASGSVGIDLGWRLVAEGLRVAYWAGDDGESGSVVLPMRDVGRWQKARDLQSIRATNFDAIVLRLAGWLAGRELPDWLTERTKTLRQWRSQGRLAAVVIQWRAERFDGDAEIFAEVEAWRKQDKHLWEWEHNQRRKAIAWRENVYRQFAAMLSRRYRVVCLEATDWRHFMRKVAAEEDGQGGAGAQRYLRIASPGQLSRLLAERFAEVVRVDPKHTTQRCHVCGELAQFDAATSLHTKCRHCGAEWDQDYNAARNLLGAASGPVPQETP

SEQ ID NO: 144 - protein, 567 aa, Unknown
  Description of Unknown: aquatic-non marine saline and alkaline-hypersaline lake sediment sequence
MFGNKALPSVIYKYGARRPVTNADEVDRQVRDAHRYRNKLVEIERDRRSCVNAKLMQLAPRLLSLETEIERLDNLIAEKRSEIKRANATRRRRDVTPEQRAELRQWQADRKALRTELKERKADAFADPRIRTALAKVDAEALAASKAARAASGVYWGTYCQVEQSLSGMRSGAPPRFLRFDGTGKLAVQLQGGLSVAKAFAGEDRRLIIEPVPPKAYLPGEPKALQRTRVWLRIGSDGREPIWTIVPITLHRPLPDDASIKWVYLTRRRVATKDRWSVCFVLARESGWQKPGLARNGSVGVNLGWRVMDDGVERGLRVARWVGDDGTEGELRLPMPDVERWKKTEDLQAIRDQRFNAAVSLLADWLADPGCLLPDWLVERTATLRQWRSAARLAAIAIQWRGERFEGDDTAFATLEAWRKKDKHLYEWQANQLRKAIAWREDLYRNLAATLSRRYHTVCLANTDWRDLARRPTAEQAETDAGARRYQRVASPGALGRLLRERFAETVTVDSRHITQRCHACGEVNQFDAAAHVRATCRHCGAEWDQDINAARNILRAASGPVACETP

SEQ ID NO: 145 - protein, 575 aa, Unknown
  Description of Unknown: aquatic-non marine saline and alkaline-hypersaline lake sediment sequence
MRLANRYYNCLVVIERERRQAVRDALQECDQRHGIDALQDVVDTLKTQRDEAREEIKRARSKTRSRSDTEDQRKRVKDLTVQIKEACELVKRARRDIRDDEQAKEQMKAADNIARTKTREARAICGVFWGTYLTIEAAIDAARKAPLWQYGKPNDPRFRRFGGRGSVSMQLQGGLAASDVFGDDRRLQIELSPQRKSNSNRSKIRRYGVIRLRVGSSKRDPIWAEWPLLMHRQLPDLSTIKWARIVCDRVANEERWSLQLTIDIPEPVKVSDERKGTVAINPGWRLLDYGVRVGYIVDDCNETDEIVIDPGVLSGLRKVEDLRSIRDRTQNTMMEEFLPWLRSHKNILPAWLTERTKTIGQWKAAARFAALAHVWSVSRFGGDVLGYELLEQWRKQDLHLWQWESFQRRKSIGRRRNQYRRLAKQLAHRYHTLVLDTTNLAEIQRHKSTESEEIEIPAARLQQRDAATAELRSYLAEAFHATGGVVVKVNHKRATRRCHVCGHEGPWNQCDEVVHKCESCGSSWDQDENNCRNLLERLGDGDKITTKRQAKWDRLGRHNKTARKLDDNDVEIQTN

SEQ ID NO: 146 - protein, 598 aa, Unknown
  Description of Unknown: aquatic-non marine saline and alkaline-hypersaline lake sediment sequence
MPTKVYKYGVRPPTKNADIVHEQMRLANRYYNCLVVIERERRQAVRDALQECDQRHGIDALQDVVDTLKTQRDEAREEIKRARSKTRSRSDTEDQRKRVKDLTVQIKEACELVKRARRDIRDDEQAKEQMKAADNIARTKTREARAICGVFWGTYLTIEAAIDAARKAPLWQYGKPNDPRFRRFGGRGSVSMQLQGGLAASDVFGDDRRLQIELSPQRKSNSNRSKIRRYGVIRLRVGSSKRDPIWAEWPLLMHRQLPDLSTIKWARIVCDRVANEERWSLQLTIDIPEPVKVSDERKGTVAINPGWRLLDYGVRVGYIVDDCNETDEIVIDPGVLSGLRKVEDLRSIRDRTQNTMMEEFLPWLRSHKNILPAWLTERTKTIGQWKAAARFAALAHVWSVSRFGGDVLGYELLEQWRKQDLHLWQWESFQRRKSIGRRRNQYRRLAKQLAHRYHTLVLDTTNLAEIQRHKSTESEEIEIPAARLQQRDAATAELRSYLAEAFHATGGVVVKVNHKRATRRCHVCGHEGPWNQCDEVVHKCESCGSSWDQDENNCRNLLERLGDGDKITTKRQAKWDRLGRHNKTARKLDDNDVEIQTN

SEQ ID NO: 147 - protein, 610 aa, Unknown
  Description of Unknown: aquatic-non marine saline and alkaline-hypersaline lake sediment sequence
MWLVHRYSNELVEIERARRKGFHAALAVVPEVAEALRVEEEALARYHVLRDSDSDDRAAEFRKKGKRRRKSSPAVADALAALKAATDAVEDVRAAAVKAIGRDSKKKTAKKKKKKKTATELVKMTPAEVASVTEAINENDAVHGDAAKRKRAEFIAQGLYWGNYQVAEASIPRKGPPPKFRRWEGRGHIAVQIQGGMTYAELLGCNHTMARLEIRDDWGSNRRTSRHGLLWIRVGSKGKGGREPVWATFPVCWHRHLPEGARIKRIDVTRRIQGVRAVWAVCVTVQTPGASLTKQALVKPTTEALPKAVGLDVGWRSTDDGGIRVAVLYDGDRHYEVALPHWFAEGDRLVSDLQSIRRCRFNAVKDQLLAALREGKHKEQAETFATLASWDSQARLARAVREWEGCPAYLTEWRAKERHLYQWERDAKRYLVEWRKNWYCHWVAWISQRYKNVVIEKFDIAKIKKKAEAGEDKEEATGPHSLAAPGELRRILLSTCSREGVQVHLAPAGNTTRKCSVCGKLRRKKKGEGVALMQECPGCGRVMDQDANAARNLYGFASVGVIPETPVAFAVPEAAWYGRFSLTPKKIQSRVARLQAALETSPPDSDGKGG

SEQ ID NO: 148 - protein, 642 aa, Unknown
  Description of Unknown: aquatic-non marine saline and alkaline-hypersaline lake sediment sequence
MAFHRSTQPTTSRVYRYGLLPPSSGANLVDEQMWLVHRYSNELVEIERARRKGFHAALAVVPEVAEALRVEEEALARYHVLRDSDSDDRAAEFRKKGKRRRKSSPAVADALAALKAATDAVEDVRAAAVKAIGRDSKKKTAKKKKKKKTATELVKMTPAEVASVTEAINENDAVHGDAAKRKRAEFIAQGLYWGNYQVAEASIPRKGPPPKFRRWEGRGHIAVQIQGGMTYAELLGCNHTMARLEIRDDWGSNRRTSRHGLLWIRVGSKGKGGREPVWATFPVCWHRHLPEGARIKRIDVTRRIQGVRAVWAVCVTVQTPGASLTKQALVKPTTEALPKAVGLDVGWRSTDDGGIRVAVLYDGDRHYEVALPHWFAEGDRLVSDLQSIRRCRFNAVKDQLLAALREGKHKEQAETFATLASWDSQARLARAVREWEGCPAYLTEWRAKERHLYQWERDAKRYLVEWRKNWYCHWVAWISQRYKNVVIEKFDIAKIKKKAEAGEDKEEATGPHSLAAPGELRRILLSTCSREGVQVHLAPAGNTTRKCSVCGKLRRKKKGEGVALMQECPGCGRVMDQDANAARNLYGFASVGVIPETPVAFAVPEAAWYGRFSLTPKKIQSRVARLQAALETSPPDSDGKGG

SEQ ID NO: 149 - protein, 640 aa, Unknown
  Description of Unknown: aquatic-non marine saline and alkaline-hypersaline lake sediment sequence
MRVYKYGLPWLLDEEEAPDGAKGGRMAVERQLRAAHVYQNKLIELIRARRLVHRDAVMGYGRVAELHKQVDDINELYQDARDDLKKTRQKERRRAESDRQKAMVAKLRELYKESLAQLYKERRKAFRDSAVKELCKEADESFYEQQRQERTRDLTDEERQRGWERPFWGTKQIVEASVKQAHESMPLWDGVRPNDPRFRSWDGSGILGVQNQRPLFSTLNDEQQMDPAVQDIFGKDTSLRVDPVDPEAWHNPKRCERKRKSRTVLWMRVGSDENRQPVWACWRMIMHRPLPDGAQIKRASVSKRIVGERQKWTVQIYVDDQGCKRAPSCGDGSVTIDLGWRQQQNGVRIATWLGSDGRQGKFKLPQKVIERMFSERGIRKTRDENLDRMRPCLEAWIRNQKCLPEWLEKRTKMIGRWRSHARFRALAQYWRGCRFPGDEEGYDMLEAWRYRDHHLWNYERGRSMKSRGWRDQLYCQFGAWLARQYGTVVWENFNIAKMAKRPKLGDDYENERARAMRHAVAVATFRDKVENAFDTRGGRSRYVSAVNTTRRCHVCGLVDAFDAASSVKRVPPCPGCGASWDQDENACVNMMETYDRGDSSSKPRKTNGARNGKKTNGNAVEGESHWARMKRLKREKDAHK

SEQ ID NO: 150 - protein, 549 aa, Unknown
  Description of Unknown: aquatic-non marine saline and alkaline-hypersaline lake sediment sequence
MFGHASDPSVIYRYGALPPTHNLDAAFEQLRAAHRYRNKLVEIERDRRDKTAAVVSAASPDLAGLESQYAELGERTAAAAKQIKATNQRARAQRATPEQKAVLRKLRAECKDVYSRLKEAKALAYKSLEARTALDQADAAALNAAKKARAECECYWGTYLQVEQGLSGIRKGAPPRFLRWTGNGKLAVQIQGGMSREEAEHGDGRLRIATTERRGKATNVYLRIGTNEDRSPIWAVVPVIFHRPIPDDARIKWVYLTARRVACHTRWHVCFVLSRAEGWRKPDLATIGTVAVDLGWRLLDHGLRVGYWRGSDGGSEEILLPTRDVARWQKADDLRAIRGERFNGVVDWLAKWLAGRDLPDWLIERTRTLRQWRSAARLASVVIHWRENRFAGDKDGFAAVEAWRKKDKHLYEWEANQRRKAVAWRDDLYRRVAADLSRRYKTAIVEDCNWRDVGRKPDVGENNDSGAAARQRTIAAPGRLKQLLVERFAETVKAEAAYTTQRCHACGELAHVETRTSVWVTCQQCGAAWDQDDNACRNMLDMVAKGPVT

SEQ ID NO: 151 - protein, 584 aa, Unknown
  Description of Unknown: aquatic-non marine saline and alkaline-hypersaline lake sediment sequence
MVDDQMRLGNRYYNRLIEIECARRDAIREAMADNDRRHGLSDAIARHARLDEQYNAAKEALKAKRSRARCRVDTAPERAAVRDLRAQRSKAAAELKEARKGHRGDSTMHAAFDAANEEAKLQRRASRAICGVYWGTYLQIEAAVDQAAKETSLFFKGKPRDPRFRRWGGSVMVATQLQGGLLALSALACDDSRLQIEMAELGPGPHSRRQLKLRKGTLRLRVGSDGRSPIWAEWPLQMHRPLPENGVIKWAKVIRRMVSDRDKWELQLTVEISPEQPCHGEGTVAVDLGWRRKEDGTIRVGYVVDDCGLEEEIILDPGVVSGLRKSEDLRSIQDKAQAEMAARVIGWLKAQAELPPWLILATGFVDKWKSARRWRRLASIWAEHPDVGSEALSVLSAWAADSLHLWRWEAHQRRKSCLRRKDQYRCLAKRLAAEYRHLVLESKFLAKLQRHVEAEDEDVEIKAVRLQQRDAAGYELKQCLIYAFRRANGTAVEVDPAMTPQRCNACGFVGRWDAAVEIDHTCEACGATWDQDANACRNLLERERPGDDSGQEAKRQGKWARKKAAKRTARKTVPSGAESFEAGV

SEQ ID NO: 152 - protein, 601 aa, Unknown
  Description of Unknown: aquatic-non marine saline and alkaline-hypersaline lake sediment sequence
MIRVYRYGLRRPTTNADLVDDQMRLGNRYYNRLIEIECARRDAIREAMADNDRRHGLSDAIARHARLDEQYNAAKEALKAKRSRARCRVDTAPERAAVRDLRAQRSKAAAELKEARKGHRGDSTMHAAFDAANEEAKLQRRASRAICGVYWGTYLQIEAAVDQAAKETSLFFKGKPRDPRFRRWGGSVMVATQLQGGLLALSALACDDSRLQIEMAELGPGPHSRRQLKLRKGTLRLRVGSDGRSPIWAEWPLQMHRPLPENGVIKWAKVIRRMVSDRDKWELQLTVEISPEQPCHGEGTVAVDLGWRRKEDGTIRVGYVVDDCGLEEEIILDPGVVSGLRKSEDLRSIQDKAQAEMAARVIGWLKAQAELPPWLILATGFVDKWKSARRWRRLASIWAEHPDVGSEALSVLSAWAADSLHLWRWEAHQRRKSCLRRKDQYRCLAKRLAAEYRHLVLESKFLAKLQRHVEAEDEDVEIKAVRLQQRDAAGYELKQCLIYAFRRANGTAVEVDPAMTPQRCNACGFVGRWDAAVEIDHTCEACGATWDQDANACRNLLERERPGDDSGQEAKRQGKWARKKAAKRTARKTVPSGAESFEAGV

SEQ ID NO: 153 - protein, 580 aa, Unknown
  Description of Unknown: aquatic-non marine saline and alkaline-hypersaline mat sequence
MARKTSKTPTKIYSYGARLDEGDMATARHILWMAQDYYDDRVRIEQARRLAYREARAQVCPWLRDAEVKIDLLELDLEKVREELKSKRKSEFRRATGTDLATMAKELLALLKPMRKEARAQRKAASADPGVQAEGQRLDLLAKTLLKSCSKYYGAKGLDWRTRGRVDDETRQAFADTASRPWRLGQCKKGFCGRVGGQVLAARGVFLDTDRLFSDWSTVVQIDPLPDHTWDTRSGRRKAITAGRISVGSLGPRRPVWLRFTAVIHRRPPRGIIKNAWLFFRERGGRVEAKFQFTLESEEFLRASPEPVHACAIAMTPSRNLSAAVAVGTDGTIQYLSLPEKVWDRFEFAESIRSAADLAFDEVRPSLVEAGLIPHQSRSRRRARRAAMGYAREALDAKAVWSTWRDERLGDGVDLWDSPDVVTDWAGRKGHDPLAVLCLVWSKKDGHLDRYEDNVRHKARGYRSETYRTWVSALASKYRLFVDPYDAKYLKHAPNPEDDPRIANIERARSRMSLYSLMTTLREKGATEVEADAVEPGAAAHVMRAASVLAKAGEDTTKAVAKIEESRRMVEMARQLDAAE

SEQ ID NO: 154 - protein, 635 aa, Unknown
  Description of Unknown: aquatic-non marine saline and alkaline-saline lake sequence
MAKVAKGEKMTFVYEYGLRPPSLNADIVDNQLILGNRYRNALVSIERKRRDAIRGWINKPVEKESIAYSEAIESFSIAETAMKKQRASTRSRSDTADQRDEVKDLRKKKKDALSVLKAARVKAKKEELFKAEMDDVENQSKQEIKDARSECGLYWGTYLVIEAAMAASRKKMPLWDKHFEPANPRYQRWQGTGTVAVQVQKSQQTTADHTMECTGRLIQLDMEKISDEERSKMSKRRQKRCFGTLRMRVGSEGRDPIWAEWPIIMHRPLPSDSTITEVRVIKKKISDHGKWNVHITIKTPDGYYKQHNGVDDKCGSGPLALDLGWRLLGTGELRVAYTTDEDGTEEEIRLDHNILTGLKKSDELQGLCDDLQNKMKSTLNEWKKTHHLPDWFAEESSHIHAWKKTHKFVRLLHSWSKNRWDGDSEGFDILNDWHFGAYKEDLGRRDGGSRHLWQWREHQRKKSLLRRKDQYRVLAARLSRKYSVLILEDLNLSKLQEHNKSEDDAVEIKEARWQQRAAACYELRECLKQAFLSRGGRVLKVKAAMTTQRCFCCGCEKKWDPIPSINHTCDQCGKTWDQDANAAKNIMLLYDKKEFSEQSSGVKKEDAESLSKWGKIGRHKKTSLKLTDNQPEQLN

SEQ ID NO: 155 - protein, 635 aa, Unknown
  Description of Unknown: aquatic-non marine saline and alkaline-saline lake sequence
MAKVAKGEKMTFVYEYGLRPPSLNADIVDNQLILGNRYRNALVSIERKRRDAIRGWINKPVEKESIAYSEAIESFSIAETAMKKQRASTRSRSDTADQRDEVKDLRKKKKDALSVLKAARVKAKKEELFKAEMDDVENQSKQEIKDARSECGLYWGTYLVIEAAMAASRKKMPLWDKHFEPANPRYQRWQGTGTVAVQVQKSQQTTADHTMECTGRLIQLDMEKISDEERSKMSKRRQKRCFGTLRMRVGSEGRDPIWAEWPIIMHRPLPSDSTITEVRVIKKKISDHDKWNVHITIKTPDGYYKQHNGVDDKCGSGPLALDLGWRLLGTGELRVAYTTDEDGTEEEIRLDHNILTGLKKSDELQGLCDDLQNKMKSTLNEWKKTHHLPDWFAEESSHIHAWKKTHKFVRLLHSWSKNRWDGDSEGFDILNDWHFGAYKEDLGRRDGGSRHLWQWREHQRKKSLLRRKDQYRVLAARLSRKYSVLILEDLNLSKLQEHNKSEDDAVEIKEARWQQRAAACYELRECLKQAFLSRGGRVLKVKAAMTTQRCFCCGCEKKWDPIPSINHTCDQCGKTWDQDANAAKNIMLLYDKKEFSEQSSGVKKEDAESLSKWGKIGRHKKTSLKLTDNQPEQLN

SEQ ID NO: 156 - protein, 631 aa, Unknown
  Description of Unknown: aquatic-sediment-groundwater sediment sequence
MKRKTSTTPTRIWSFGALEPTENQKALLDQLFFANRYYNTLIEIERKRRNRFREIRSEAVPELSMLEKRYQQLDADYVQMVAALPKPEKGKRKTLTPEVLANKEERKTTSARMKVLRAAFLEDADAKIQTAKADEEAQLAVKAARAATDLYWGTYLLIERQVDEARKSKSDPDFRRFDGQGRVGVQLQGGLSTPELLSGEDSRLRLQPRTSTPRVKKPKAQHEVRIRIGSLGRDPIWATLPVIVHRPLPEDAEVKWAWVRIVRCGRRRIYSLQLTLESATFDRSQSGVGTVAINFGWRANEDGSRRVAYAVDDAGKEQVLSIPASIEKDTTQANSLRSLRDLHFEEAKRSLVAFAALHPKAMPEWYAEEAKFLHQWRNPARLVRLAQRLAEEHPVDSNELLRWRQERLGGARFGRHWRSPGAPKQDLFAPFPEVMSWSTTRGIGALNFYLELWARKDKHLWGWEASLRRSVDLRRNDLFRTWAKRMTAYAEVRVEEFDLRKMTAIPAVGEEPRDSSFRSAQRAASPGKLRERIAEACGAKVMKGAAFHNTVTCFLCSHVNERSMEHRTVCAGCGEEFDQDANNCRNQLRERPSGAPEAGGARNPQKDPVVSDGYDESTVDRDVPSGVVAAE

SEQ ID NO: 157 - protein, 553 aa, Unknown
  Description of Unknown: aquatic-sediment-groundwater sediment sequence
MKRASREAGQVVVYRYGCPSWADLPESGMVQLRLAHDLRNELVAVEYRYRELIDGIWSSQSAVSVAELALADATAAVERAAALMLAQRKIDRSTIPRAGAKQALAEARAARREAKLTVKVAKAIDKEAAGPLLADAKAARYAAITSTRAEYVVAGLFWATANDVVQNHDTAAKLVALAWKQGRPARRRTRPWKGTGTITTQVMWQAGKPARTPGVLASATSPWRNVFRIEPGRSRGEWPGQPSSGGTVRDDHATVHLRIEKGAEAICLPIVLHRPLPTDGDVAGVQITRRRIAGCYRLSIAITVRLPEPTPALGGVPVSVTFGWAAAGDGAVHVARLGAPFGLGPPPPWLVKHLVAIPASATDVDVFAPAIWRLLLARDDSIRGHRDDLLDGLREQVITALDEGVEVRLWPDDEDLLRSPVVARWRAPRRFVTLARAWPVEHPMAAMLEAWRLRDRHLWEYESHERDQVIARRRDAYRSVAAWICGQASEILLDYPPVAELRQVPDVNEEDEYVARAGRRQVQFAAPGDLRAAIEVAARRRGVKVIDVRVPPE

SEQ ID NO: 158 - protein, 625 aa, Unknown
  Description of Unknown: aquatic-thermal springs-hot spring sequence
MRVYRYGAKLRGPLDPVAEEQVELANRFWNELVDMHRKYGELLQKAQEEASPALAALRAEMAALAEEKIRLRGLIKKSRQKARGNVPADPAIKEQLRAVSQRIKELKPIVKMEKEKAKTASSDERHRLSEQQKLEKKRLRQKYAALGLYWSNYNAVLQGFDTAVKRELETQGRLRVRKHAPSGAAVWTVRIQHPTGAREYTWADATRGDPSKPFSIIMPDSEREEFTTHDGRTLSRRRLPVARLRVRAERAKTPDGTWVEFGGHHIDVPFYMHRQPPPTARVVMARLVRKRIADCYEYHLCITVDEPPAPKRSGTAAGVDLGWRRLPDGAVRVAYVAGEDGAKGALAVPQSTLDRLAHAERLQGIRDSALEGIRSDFVAWAKPLLGNPALPDFVAAALAGDREHGIPPLASWRSPRRFARLTGQLVRWAADHPNQAAALPDWPAWNRRIQSWNRQDKPLWRTLSFLRVKAIAHRNEQYRIFAKRLAERYAYIVLEDMDIQDMNRKPQAEQAPETSQQKLRHLARAAAPAAVRSAIENASWRWGSTFVKVDPANTTRRHAPCGNLVEQNYAESVMVYCPECKVWYDQDENAAVNLLLRIRENPPPAPTNPKPANGSRWQRAKAKAR

SEQ ID NO: 159 - protein, 649 aa, Unknown
  Description of Unknown: aquatic-thermal springs-hot spring sequence
MGPPAEAPGPRRDTAHSTEEEIASMRVYRYGAKLRGPLDPVAEEQVELANRFWNELVDMHRKYGELLQKAQEEASPALAALRAEMAALAEEKIRLRGLIKKSRQKARGNVPADPAIKEQLRAVSQRIKELKPIVKMEKEKAKTASSDERHRLSEQQKLEKKRLRQKYAALGLYWSNYNAVLQGFDTAVKRELETQGRLRVRKHAPSGAAVWTVRIQHPTGAREYTWADATRGDPSKPFSIIMPDSEREEFTTHDGRTLSRRRLPVARLRVRAERAKTPDGTWVEFGGHHIDVPFYMHRQPPPTARVVMARLVRKRIADCYEYHLCITVDEPPAPKRSGTAAGVDLGWRRLPDGAVRVAYVAGEDGAKGALAVPQSTLDRLAHAERLQGIRDSALEGIRSDFVAWAKPLLGNPALPDFVAAALAGDREHGIPPLASWRSPRRFARLTGQLVRWAADHPNQAAALPDWPAWNRRIQSWNRQDKPLWRTLSFLRVKAIAHRNEQYRIFAKRLAERYAYIVLEDMDIQDMNRKPQAEQAPETSQQKLRHLARAAAPAAVRSAIENASWRWGSTFVKVDPANTTRRHAPCGNLVEQNYAESVMVYCPECKVWYDQDENAAVNLLLRIRENPPPAPTNPKPANGSRWQRAKAKAR

SEQ ID NO: 160 - protein, 598 aa, Unknown
  Description of Unknown: aquatic-thermal springs-hot spring sequence
MRQLRVAHEVYNTLVQYERERRKAVADATRETDAEVARLEAEVEGLLSRLADLRAAIQAARAGGGDNARLAEAQAEARECRRLLGEAKGALRETKRVARQNPALRERLEAIKAEHHRRQLALYHEVVEVGKRLYWPSWNDTKAAVEQAAKKTKNGDLRFRRWTGEGSLYTQVQGKQPVCETATSRWVRIDPVPPEAHDPATPRGERRRLCRTRFYLRIGSTGPREDPVFAVFPMVYHRPLPEGAVICGARIVRRKNADREYWQAVVTVDLPDEAAQKSGPRVCALDIGWRDRRPGGSDEPPPLRVAAWYDGDRTGEVLVDPSVFERCAKADAIRSTRDRMLDDLRAWLCEARKDLPEHLAEALAGCGLWRAAGKFARLRGLLSSGDVPAEVRDRFLAWYHRDRHLWQYEHGMRLNAIRDRDNAYRIAAKRFAQEYDVLIVEATGTPQKERDPKAPAAMDLRPLIKEPDPEDAPPRDQQRERKENKAHHQRFIAAAGTFRRYLLEAAAKYGTRVVMVPCEQTTLECWVCGAKYEFDRWPLMHECESCGTTWDQDQNAARNLFARGAVAAKGPGPLEVQGKPRLPRWHKRHKAYREGGAG

SEQ ID NO: 161 - protein, 618 aa, Unknown
  Description of Unknown: aquatic-thermal springs-hot spring sequence
MATRNCRYGLLAPVEGRDEVMRQLRVAHEVYNTLVQYERERRKAVADATRETDAEVARLEAEVEGLLSRLADLRAAIQAARAGGGDNARLAEAQAEARECRRLLGEAKGALRETKRVARQNPALRERLEAIKAEHHRRQLALYHEVVEVGKRLYWPSWNDTKAAVEQAAKKTKNGDLRFRRWTGEGSLYTQVQGKQPVCETATSRWVRIDPVPPEAHDPATPRGERRRLCRTRFYLRIGSTGPREDPVFAVFPMVYHRPLPEGAVICGARIVRRKNADREYWQAVVTVDLPDEAAQKSGPRVCALDIGWRDRRPGGSDEPPPLRVAAWYDGDRTGEVLVDPSVFERCAKADAIRSTRDRMLDDLRAWLCEARKDLPEHLAEALAGCGLWRAAGKFARLRGLLSSGDVPAEVRDRFLAWYHRDRHLWQYEHGMRLNAIRDRDNAYRIAAKRFAQEYDVLIVEATGTPQKERDPKAPAAMDLRPLIKEPDPEDAPPRDQQRERKENKAHHQRFIAAAGTFRRYLLEAAAKYGTRVVMVPCEQTTLECWVCGAKYEFDRWPLMHECESCGTTWDQDQNAARNLFARGAVAAKGPGPLEVQGKPRLPRWHKRHKAYREGGAG

SEQ ID NO: 162 - protein, 572 aa, Unknown
  Description of Unknown: aquatic-thermal springs-hot spring sediment sequence
MFGHESLPSRIYSYGTMKLGDFPGRDKAEEQMRLAHRYRNRLVEIELARRRAVEEALRRLSPDLVGCELAIEAQERALEVARSSIRRASAEARKKVASPEARDAAKTAIAHLKRERAKRMSLRKALFSSSDWEAEEKRISDEAGAAIRKARAECGLYWGTYLHVEGTVKRTGAPPRFHRWDGSGHLAVQIQHGMTWAEALAGADNRLRVRHAPPTNSKHSQLLHVVSVRVGSTEDGFPVWADVPRVVLHRPIPDGARIKWVHLIRRRIGCSQKWHVQFVVSAESWERTDRATSGTVGINVGWRMRPDGSLRVAAFCGDDGRRGELCLPSRWLAQWKKTEDIRSIRDRNFDDVRTAIANWVKGTIPEHVRALTGEVMPELPPWWRQRAATLASWKSPARLAALTLHWRANRFAGDAVMFPLVEDWRRRDRHLYEYERHLADQLLAEREDLYRVFAADLRRRYKTAIVMELDLRDFHVLPPAEEPTPDGALREHTRDACLSLLHRCLDESMSEVIRSDPRNVTRMCRECGGLNDWDRKVLHRVCSWCHAEWDQDENAARNLRDRTGGGASDKVA

SEQ ID NO: 163 - protein, 580 aa, Unknown
  Description of Unknown: aquatic-thermal springs-hypersaline mat sequence
MPFGKKRSDKVAIVYEYGCLPPEGGLPAVAERQLVLADDFWNSLADIDRRHRAKMREILDDGELGKLNAHITSCKARIEELRGQIKGVNQRERRNAGVDANTKAEIARLKAEVKATAARIKEIKPEHIAKQKPLLEENDALRQAAVKRARQWFSDRGLYWGTYNAVLRSYETAHKVLLKSGEQMQAHRYTGEGRWVVQIITTAGEKPTTAEDLATGTMVQIDPVDFSDWKHISRGERRRRARTKCRIRVGSEGRAPVWLELPCVMHRPLPEGAEIVGADVTRRLVGPARWEYRLHLTLRVPAPVPADAAKPAIGVDIGWRALPNGGTRVAYAVGEDGSRKEVVCPDDILAGLAKSSDLRSLRDEKMNRIKAFLRDVIPGLDSADLSEQTEHLAMWKSPKRLIRLYRWWKEHRVEGDTEAFGRLHEWYYHDYWHLYQYEDDMRQQVLARRRDMYRIAAKEIAERASVVVIEEFDLRKFAQEDQPEDGEDNKIQRARRVAVAPSEFRIALRQACAARGVRVVEKPAQNTTRVHVVCGQVVAADYAADVTVRCPRCGVAYDQDANAALNLLGAGRGESTPAAS

SEQ ID NO: 164 - protein, 619 aa, Unknown
  Description of Unknown: arthropoda-digestive system-termite gut sequence
MITVVQYGVWHKWMRDVPRDVMDQLWLSHCVREDFVSTTLAYDARLKEIWSSFPVVGEAECRLLEASDALDVLLEEQRVVRQSSRSKKVSADLRSRLADARGVVRAARVGRRDAIQVAKDAAMPLIVQAKDAQREARRGLYAKYCSYGVPDRDGRVIRLYHATFNDVRVMHEAAEKRLASSRKQGGRGQMRHHRFDGTGTLCVSLLRTAGDPPRTPMVVANSESGAYRNVLGVPWVAPVVWEGLSRSQRRADGRVGVRMRVGYGDDLKSPTHVDIPVQAHRFLPAEADITGAKLSIRRRGTKLIGSLSITAKDVPDPLPVKDGPSIVLHWGWRDVPTGGAEVARWVSTSPLDIPVDMRGVFTCHDESRMSGAVIAPAVMFTKLDHVEALQSELDTAFNEARGVLSEWLRAHPDVVVDDPTSREPVVLTGAVVGAWRSHERLARLAWAWHRECPAGVEDMESVLWEWRCGHRHVSNIAANTRARAINARRDVYRNVAAVISGQCGGVGVDDMDLARLASRGASSELPDTVTAPGSRRRVYAAPGELRYCIVSACQKDGVTVVTLDTAENSHTCHACGYANPGDDRWLNPMVLCDGCGKVFDQNTNALLNLVDKYTATLAV

SEQ ID NO: 165 - protein, 667 aa, Unknown
  Description of Unknown: arthropoda-digestive system-termite gut sequence
MVVAPPPVCDLRGNIPWILSWIIDEPAMLGMLLALYAGTLSEMIRVYRYGLLAPTMNGKLVKEQMRAAHRYRNALIEIECARRDALRRLLTESGLRELEEETAAANEAVHAAAAAAREARMTVQSKSEPIDARQRMRDAREVSRRALDALRVRRREVRENHAVQRAMDEINERAARLRRGARALCGVYWGTYLLVEDADHRARAAALYDGAQPNNPRCSRFVGAGRVGVQIQKGFPCETLFGSDARLRVAPVDSGAWHSMRRGERRQLSRTTLSLRIGSEGRDPIWAQWPMLMHRPLPEGSIVKRATVSVRRRGPRDEWAVEITVDVADEILAVQRTDSNESAVAIHIGWRAIGNELRVAAWAGSDGRSGELRLPASLLGAFAKVEELRSIRDRNLAAARDALSGWLAAAASIPEWLREATVGIMEWRVPSRLAVLAKQWRNVRFVGDEKAYEALEAWRYHDYHLWSWEDSQRIHALRARRELYRIFAAQLAREYVSIVIEDFDLRVVAKRHLVEDASIEWRGLRRNRQAAAVSELRASLQNASKSRSARIELLDTRSFLQPCHACGSKERFDSVEPLDHSCSGCGAIWDRDSNAALVLLQRWRREHACGGEVAHADVDTKPVPEGRWVRARRHRAEKDAHARFGASDNSEWFGNGNASVISIESPS

SEQ ID NO: 166 - protein, 618 aa, Unknown
  Description of Unknown: arthropoda-digestive system-termite gut sequence
MITVIKYGVWHTWSRHIPDSVRDQLWLAHCAREDLVTTTLDYHDALKDIWSSFPEVAAAEQRIRDADDLLATLLDEQSKARQASQSKKVPTDLRQRLTQARASVRSAKQERRDAITTAGVIATPLIAQAKDAQYARRKELYTTYCTRGIPDRDGRIVRLYHATFNDVRTSHETAEKRISASRANGSPAQMRHHRFDETGTLAVSLLRQAGAPPRTPQVLADTETGKYRNVLAMPWFTPDAWAGKTRAQQRVDGRVTLRMRIGYADDLSSPTFVDLPVQAHRFFPPEADITGAKLTIQRRGTTFHATVSITGKGLPDPTPVTSGPAVVLHWGWREVDTDIVEVARWAADAPLHIPDDMGDVFTTDGSGTGGSILTPKTVFTRLNHVEKLQSEQGTAFSSAKNALVSWLSTHATPMGDPTSKQPQPLAPALVDAWRSPDRLARLAWLWRDDRPDGADDLTADLLAWRGAYRHTATLIANTRAKAISHRNDVYRNVAAVISGQAATVGLDSMDLATIAATSARSELSGDVTQPGARRRTYAAPGTLREYIAAACAKDGVTVSSLDSSHASRTHYECGHTNPRDTKWLNPIVRCDGCGESFDQNTNALHHLQARQRDLSLTA

SEQ ID NO: 167 - protein, 584 aa, Unknown
  Description of Unknown: groundwater metagenome sequence
MPFGRKAKPCRVFEYGCLPPVSGKDELLKELRLRNNYWNKLVEIDRLIRQRSALILLLPGDIEAAHLDAQIDLMRGEIKKGRQRTRSSITDADLKQRIKDSIAELRVLWEQNKKDRKPLIETTRADLAAIETEWRVARKAARADSGLYWCNYDDVDTAYDVARKETAKKWAFPKFRRFDGTGKVTVRWQNGLNANNVFDGTGTLLQIAPVHQDAWNHPVRSNRRKASRTTVRFRVRSENRSPVWVELPMVMHRPLPAGGEIRSASLVCGYVGGKPTYKLVITVAPPAHTLPEEGMHRGIRPTVGINLGWRKKDNDIRIAYWADEEGRHGELTLTSNTLAQFSKLNDLKSIRDKYFNEAISALALYISEGTIPDWLKADTTHLNKWRSKPRLLALVGKWRETRFTGDEIIYEALFYWRGRELHLHQWEANLRDQVQRHRRERYRIFAAQLAKDYSQIFIENHNLVVTKKKKATEDGTYLTTEVDTLRTIASPGILRGQIENACRREGVIFTKLDAKHITSKCHICGWQEKWNAAATITRECPGCKTEWDQDYNAARLLLQRGLDGGYLAVPQTTLEDDPNFCIGS

SEQ ID NO: 168 - protein, 567 aa, Unknown
  Description of Unknown: human gut metagenome sequence
MNKVSITKVFKYRCFEPVEGLALFDEALDNRHTLWNKLVEIDRDFREKSTQIITPIKSDYQVLDQEIKNLQDSIKAIKRKTRSTAKEETRNIQDTIKELKVKRKEAYQEFKRLKHEAIEREKPLLDCLNNERKEKVKQLRSESGLHGFNFDDVIHNIYDVARIKAMKQGTLLQFKRYSKNGKIAVRPYSSSPLYGSDIHRVNTIFYIEPVNQELYNSPIRGVRKKASVTRCHIRVGSADKGKPIFVTLPMVYHRPLPMDGKINAINVKRHYIDHKPIYECLITVTYAIEAPTINPNSCVAVDLGWRMTKDGLRAAYATDTDDKTIECIVTQRQLNEFDTICGLSSTRQKHLNDCIHVIKAWMANKNLPDWLTDAVAYIDKWKSYTHIFDLHSAFLQHKKSGNQEIVSYLEAYIERENHLRTWQSNLQNQVIARRNYEYQNFAAKLANMYDVLVLEKLSITNIVKHQKAIIGSQQSTAVDRNRTIVAPYVLKTILINAFRSRGKQFVEVNASYSTKVCHHCGALEEVHQSSIMHTCTQCHTVWDQDYNACINLLALYNHDNKGGVSCV

SEQ ID NO: 169 - protein, 563 aa, Unknown
  Description of Unknown: human gut metagenome sequence
MNKVSITKVFKYRCFEPVEGLSLFDEALDNRHMLWNKLVEIDRDFREKSSKIITPIQSDYQVLDQEIKNLQDAVKAIKCKTRSTAKEETRTIQDTIKELKVKRKEAYQEFKRLKHEAIEREKPLLDCLNNERKEKVKQLRSKSGLHGFNFDDVTHNIYEVARVKAMKQGTLLRFKRYSKNGKIAVRPYSNSPLYGSDIHRVNTIFYIDPVNQELYNSPIRGVRKKASVTQCHIRIGSAVKGKPIFVTLPMVYHRPLPMDGKINAINIKRHYIDQKPIYECFITVTYLIEAPAVNPNSCVAVDLGWRMTKDGLRAAYATDKDHKAIECIVTQRQLNEFDTIRGLSSTRQKHFNDCIHVIKAWIANKNLPDWLIDAVAYIDKWKSYTHIFKLYNAFLQHEKSGNQEIISYLEAYIERENHLRIWQSNLQDQAIAKRNYEYQNFAARLANMYDVLVLEKLSITDIVKYQKAIIGSQQSTALDRNRTIVAPYELKTILINAFTSRGKQFVEVNASYSTKVCHHCGALEEVHQSSIMHTCTQCHTVWDQDYNACINLLALYDNKVGAY

SEQ ID NO: 170 - protein, 567 aa, Unknown
  Description of Unknown: human metagenome sequence
MNKVSITKVFKYRCFEPVEGLALFDEALDNRHTLWNKLVEIDRDFREKSSQIITPIQSDYQVLDQEIKNLQDSIKAIKRKTRSTAKEETRNIQDTIKELKVKRKEAYQEFKRLKHEAIEREKPLLDCLNNERKEKVKQLRSESGLHGFNFDDVIHNIYDVARIKAMKQGTLLQFKRYSKNGKIAVRPYSSSPLYGSDIHRVNTIFYIEPVNQELYNSPIRGVRKKASVTRCHIRVGSADKGKPIFVTLPMVYHRPLPMDGKINAINVKRHYFDHKPIYECLITVTYAIEAPTINPNSCVAVDLGWRMTKDGLRAAYATDTDDKTIECIVTQRQLNEFDTICGLSSTRQKHLNDCIHVIKAWMANKNLPDWLTDAVAYIDKWKSYTHIFDLHSAFLQHKKSGNQEIVSYLEAYIERENHLRTWQSNLQNQVIARRNYEYQNFAAKLANMYDVLVLEKLSITDIVKHQKAMIGSQQSTALDRNRTIVAPYELKTILINAFTNRGKQFVEVNASYSTKVCHHCGALEEVHQSSIMHTCTQCHTVWDQDYNACINLLALYNHNNKVGVSCV

SEQ ID NO: 171 - protein, 567 aa, Unknown
  Description of Unknown: human metagenome sequence
MNKVSITKVFKYRCFEPVEGLALFDEALDNRHMLWNKLVEIDRNFREKSSQIITPIQSDYQVLDQKIKNLQDSIKAIKRKTRSTAKEETRNIQDTIKELKVKRKEAYQEFKRLKHEAIEREKPLLDCLNNERKEQVKQLRSKSGLHGFNFDDVIHNIYDVARVKAMKQGTLLRFKRYSKNGKIAVRPYSNSPLYGADIHKVNTIFYIEPVNQELYNSPIRGVRKKASVTQCHIRVGSADKGKPIFVTLPMVYHRPLPMDGKINAINVKRHYIDHKPIYECLITVTYVIEAPAVNPSSCVAVDLGWRMTKDGLRAAYATDKDNKTMECIVAQRQLNEFDTIRGLSSTRQKHFNDCIHVIKAWIANKNLPDWLIDAVAYIDKWKSYTHIFELYNAFLQHEKSGNQEIVSYLEAYIERENHLRIWQSNLQDQVIAKRNYEYQNFAAKLANMYDVLVIEKLSITDIVKHQKAIIGSQQSTALDRNRTIVAPYVLKTILINAFTSRGKQFVEVNASYSTKVCHHCGALEEVHQSSIMHTCTQCHTIWDQDYNACINLLTLYNHDNKVGVSCV

SEQ ID NO: 172 - protein, 567 aa, Unknown
  Description of Unknown: human metagenome sequence
MNKVSITKVFKYRCFEPVEGLALFDEALDNRHTLWNKLVEIDRNFREKSSQIITPIQSDYQVLDQEIKNLQDSIKAIKRKTRSTAKEETRNIQDTIKELKVKRKEAYQEFKRLKHEAIEREKPLLDCLNNERKEKVKQLRSESGLHGFNFDDVIHNIYDVARIKAMKQGTLLQFKRYSKNGKIAVRPYSSSPLYGSDIHRVNTIFYIEPVNQELYNSPIRGVRKKASVTRCHIRVGSADKGKPIFVTLPMVYHRPLPMDGKINAINVKRHYIDHKPIYECLITVTYAIEAPTINPNSCVAVDLGWRMTKDGLRAAYATDTDDKTIECIVTQRQLNEFDTICGLSSTRQKHLNDCIHVIKAWMANKNLPDWLTDAVAYIDKWKSYTHIFDLHSAFLQHKKSGNQEIVSYLEAYIERENHLRTWQSNLQNQVIARRNYEYQNFASKLANMYDVLVLEKLSITDIVKHQKAMIGSQQSTALDRNRTIVAPYELKTILINAFTNRGKQFVEVNASYSTKVCHHCGALEEVHQSSIMHTCTQCHTVWDQDYNACINLLALYNHNNKVGVSCV

SEQ ID NO: 173 - protein, 567 aa, Unknown
  Description of Unknown: human metagenome sequence
MNKVSITKVFKYRCFEPVEGLALFDEALDNRHMLWNKLVEIDRNFREKSSQIITPIQSDYQVLDQKIKNLQDSIKAIKRKTRSTAKEETRNIQDTIKELKVKRKEAYQEFKRLKHEAIEREKPLLDCLNNERKEQVKQLRSKSGLHGFNFDDVIHNIYDVARVKAMKQGTLLRFKRYSKNGKIAVRPYSNSPLYGADIHKVNTIFYIEPVNQELYNSPIRGVRKKASVTQCHIRVGSADKGKPIFVTLPMVYHRPLPMDGKINAINVKRHYIDHKPIYECLITVTYVIEAPAVNPSSCVAVDLGWRMTKDGLRAAYATDKDNKTMECIVAQRQLNEFDTIRGLSSTRQKHFNDCIHVIKAWIANKNLPDWLIDAVAYIDKWKSYTHIFELYNAFLQHEKSGNQEIVSYLEAYIERENHLRIWQSNLQDQVIAKRNYEYQNFAAKLANMYDVLVIEKLSITDIVKHQKAIIGSQQSTALDRNRTIVAPYVLKTILINAFTSRGKQFVEVNASYSTKVCHHCGALEEVHQSSIMHTCTQCHTIWDQDYNACINLLALYNHDNKVGVSCV

SEQ ID NO: 174 - protein, 492 aa, Unknown
  Description of Unknown: marine sediment metagenome sequence
MNLGRVYYNSLVEAENERRTTMWGGDRPPSPATHVCKKSCSTCDKAESKKRKPRKHECKKFCPVCRAHYKALRKQYRSEPPLDVKPFRKKAAEGGLYWGTYLVIEQDFSAAWKETESFSLVKFRSWRQGDMCAVQIQRDKDPDRMFLIKSAPDPRKKKQQRYTLRLRVGSKGQAPVWAEPLPFEMHRPLQGTATWVKIARKYVADRVIWSVQFTRRDIPERKDNAERGAVAIDVGWRKTDDGMRIAYARGDDGAEYELVLPPKWMKHADQADRIRSARDQNLVELQKQERFWSVILAVCGFSNKKLFARLKSTLSVRRVAKPGEHTKWIKKERHLWQYEAGCRNRSVTRRRNDVRVWLRDLRRRYAHAVIKDSCHKKMKENKTSLPKPARRQGHHAAPGEVIEEITRVFGRITGVSVVCAVDTTNHCPACSFVNSYGPERVVTCGGCGVVEDRDRVSTQNMMNMYAIGNVRNPTTRKSTPRFAKKHKDPEAP

SEQ ID NO: 175 - protein, 511 aa, Unknown
  Description of Unknown: marine sediment metagenome sequence
MTKVYKYGALPGGDTLCAQMNLGRVYYNSLVEAENERRTTMWGGDRPPSPATHVCKKSCSTCDKAESKKRKPRKHECKKFCPVCRAHYKALRKQYRSEPPLDVKPFRKKAAEGGLYWGTYLVIEQDFSAAWKETESFSLVKFRSWRQGDMCAVQIQRDKDPDRMFLIKSAPDPRKKKQQRYTLRLRVGSKGQAPVWAEPLPFEMHRPLQGTATWVKIARKYVADRVIWSVQFTRRDIPERKDNAERGAVAIDVGWRKTDDGMRIAYARGDDGAEYELVLPPKWMKHADQADRIRSARDQNLVELQKQERFWSVILAVCGFSNKKLFARLKSTLSVRRVAKPGEHTKWIKKERHLWQYEAGCRNRSVTRRRNDVRVWLRDLRRRYAHAVIKDSCHKKMKENKTSLPKPARRQGHHAAPGEVIEEITRVFGRITGVSVVCAVDTTNHCPACSFVNSYGPERVVTCGGCGVVEDRDRVSTQNMMNMYAIGNVRNPTTRKSTPRFAKKHKDPEAP

SEQ ID NO: 176 - protein, 567 aa, Unknown
  Description of Unknown: metagenome sequence
MNKVSITKVFKYRCFEPVEGLALFDEALDNRHTLWNQLVEIDRNFREKSSQIITPIQSDYQVLDQEIKNLQDSIKAIKRKTRSTAKEETRIIKDTIKELKVKRKEAYQEFKRLKHEAIEREKPLLDCLNNERKEQVKQLRSKSGLHGFNFDDVIHNIYDVARVKAMKQGTLLRFKRYSKNGKIAVRPYSNSPLYGADIHKVNTIFYIEPVNQELYNSPIRGVRKKASVTQCHIRVGSADKGKPIFVTLPMVYHRPLPMDGKINAINVKRHYIDHKPIYECLITVTYVIEAPAVNPSSCVAVDLGWRMTKDGLRAAYATDKDNKTMECIVAQRQLNEFDTIRGLSSTRQKHFNDCIHVIKAWIANKNLPDWLIDAVAYIDKWKSYTHIFELYNAFLQHEKSGNQEIVSYLEAYIERENHLRIWQSNLQDQVIAKRNYEYQNFAAKLANMYDVLVIEKLSITDIVKHQKAIIGSQQSTALDRNRTIVAPYVLKTILINAFTSRGKQFVEVNASYSTKVCHHCGALEEVHQSSIMHTCTQCHTIWDQDYNACINLLALYNHDNKVGVSCV

SEQ ID NO: 177 - protein, 567 aa, Unknown
  Description of Unknown: metagenome sequence
MNKVSITKVFKYRCFEPVEGLALFDEALDNRHTLWNKLVEIDRDFREKSSQIITPIQSDYQVLDQEIKNLQDSIKAIKRKTRSTAKEETRNIQDTIKELKVKRKEAYQEFKRLKHEAIEREKPLLDCLNNERKEKVKQLRSESGLHGFNFDDVIHNIYDVARIKAMKQGTLLQFKRYSKNGKIAVRPYSSSPLYGSDIHRANTIFYIEPVNQELYNSSIRGVRKKASVTRCHIRVGSADKGKPIFVTLPMVYHRPLPMDGKINAINVKRHYIDHKPIYECLITVTYAIEAPTINPNSCVAVDLGWRMTKDGLRAAYATDTDDKTIECIVTQRQLNEFDTIRGLSSTRQKHFNDCIHVIKAWMANKNLPDWLTDAVTYIDKWKSYKHIFELHDAFLQHKKSGNQEIVSYLEAYIERENHLRTWQSNLQDQVIARRNYEYQNFAAKLANMYDVLVLEKLSITDIVKHQKAIIGSQQSTALDRNRTIVAPYELKKILINAFTNRGKQFVEVNASYSTKVCHHCGALEEVHQSSIMHTCTQCHTVWDQDYNACINLLALYNHDNKVGVSYV

SEQ ID NO: 178 - protein, 567 aa, Unknown
  Description of Unknown: metagenome sequence
MNKVSITKVFKYRCFEPFEGLELFNEALDNRHTLWNKLVEIDRDFREKSSQIITPIQSEYQILDQEIKNLQDSIKAIKRETRSTAKEETRNIQDTIKELKVKRKEAYQEFKRLKHEAIEREKPLLDCLNNERKEKVKQLRSESGLHGFNFDDVIHNIYDVARIKAMKQGTLLQFKRYSKNGKIAVRPYSSSPLYGSDIHRVNTIFYIEPVNQELYNSSIRGVRKKASVTRCHIRVGSADKGKPIFVTLPMVYHRPLPMDGKINAINVKRHYIDHKPIYECLITVTYAIEAPTINPNSCVAVDLGWRMTKDGLRAAYATDTDDKTIECIVTQRQLNEFDTIRGLSSTRQKHFNDCIHVIKAWMANKNLPDWLTDAVAYIDKWKSYKHIFDLYDAFLQHKKSGNQEIVSYLEAYIERENHLRTWQSNLQDQVIARRNYEYQNFAAKLANMYDVLVLEKLSITDIVKHQKAIIGSQQSTALDRNRTIVAPYELKTILINAFTNRGKQFVEVNASYSTKVCHHCGALEEVHQSSIMHTCTQCHTVWDQDYNACINLLALYNHDNKVGVSYV

SEQ ID NO: 179 - protein, 567 aa, Unknown
  Description of Unknown: metagenome sequence
MNKVSITKVFKYRCFEPVEGLALFDEALDNRHTLWNKLVEIDRDFREKSTQIITPIQSDYQVLDQEIKNLQDSIKAIKRKTRSTAKEETRNIQDTIKELKVKRKEAYQEFKRLKHEAIEREKPLLDCLNNERKETVKQLRSESGLHGFNFDDVIHNIYDVARIKAMKQGTLLQFKRYSKNGKIAVRPYSSSPLYGSDIHRINTIFYIEPVNQELYNSSIRGIRKKASVTRCHIRVGSADKGKPIFVTLPMVYHRPLPMDGKINAINVKRHYIDHKPIYECLITVTYAIEAPTINPNSCVAVDLGWRMTKDGLRAAYATDTDDKTIECIVTQRQLNEFDTIRGLSSTRQKHFNDCIHVIKAWMANKNLPDWLTDAVAYIDKWKSYKHIFDLYDAFLQHKKSGNQEIVSYLESYIERENHLRTWQSNLQVQVIARRNYEYQNFAAKLANMYDVLVLEKLSITDIVKHQKAIIGSQQSTALDRNRTIVAPYELKKILINAFTNRGKQFVEVNASYSTKVCHHCGALEEVHQSSIMHTCTQCHTVWDQDYNACINLLALYNHDNKVGVSNV

SEQ ID NO: 180 - protein, 567 aa, Unknown
  Description of Unknown: metagenome sequence
MNKVSITKVFKYRCFEPVEGLALFDEALDNRHTLWNKLVEIDRDFREKSSQIITPIQSDYQVLDQEIKSLQDSIKAIKRKTRSTAKEETRNIQDTIKELKVKRKEAYQEFKRLKHEAIEREKPLLDCLNHERKEKVKQLRSESGLHGFNFDDVIHNIYDVARIKAMKQGTLLRFKRYSKNGKIAVRPYSSSPLYGSDIHRVNTIFYIEPVNQELYNSSIRGVRKKASVTRCHIRVGSADKGKPIFVTLPMVYHRPLPMDGKINAINVKRHYIDHKPIYECLITVTYAIKSPAVNPDSCVAVDLGWRMTKDGLRAAYATDTDNKTMECIVAQRQLNEFDTIRGLSSTRQKHFNDCIHVIKAWMANKNLPDWLTDAVAYIDKWKSYKHIFDLYDAFLQHKKSGNQEIVSYLEAYIERENHLRIWQSNLQDQVIARRNYGYQNFAAKLANMYDVLVLEKLSITDIVKHQKAIIGSQQSTALDRNRTIVAPYELKTILINAFTNRGKQFVEVNASYSTKVCHHCGALEEVHQSSIMHTCTQCHTVWDQDYNACINLLALYNHDNKVGVSYV

SEQ ID NO: 181 - protein, 567 aa, Unknown
  Description of Unknown: metagenome sequence
MNKVSITKVFKYRCFEPVEGLALFDEALDNRHTLWNKLVEIDRDFREKSSQIITPIQSDYQVLDQEIKNLQDSIKAIKRKTRSTAKEETRNIQDTIKELKVKRKEAYQEFKRLKHEAIEREKPLLDCLNNERKEKVKQLRSESGLHGFNFDDVIHNIYDVARIKAMKQGTLLQFKRYSKNGKIAVRPYSSSPLYGSDIHRVNTIFYIESVNQELYNSPIRGVRKKASVTRCHIRVGSADKGKPIFVTLPMVYHRPLPMDGKINAINVKRHYIDHKPIYECLITVTYAIEAPTINPNSCVAVDLGWRMTKDGLRAAYATDTDDKTIECIVTQRQLNEFDTIRGLSSTRQKHFNDCIHVIKAWMANKNLPDWLTDAVAYIDKWKSYKHIFDLYDAFLQHKKSGNQEIVSYLEAYIERENHLRTWQSNLQDQVIARRNYEYQNFAAKLANMYDVLVLEKLSITDIVKHQKAIIGSQQSTALDRNRTIVAPYELKKILINAFTNRGKQFVEVNASYSTKVCHHCGALEEVHQSSIMHTCTQCHTVWDQDYNACINLLALYNHDNKVGVSYV

SEQ ID NO: 182 - protein, 582 aa, Unknown
  Description of Unknown: metagenomes unclassified sequences
MWYAHRYGNVLVEIERARRAAVRLAYGPLATFEHAAKEAGTVVRDAREAIKRARAEHRARVETDAMKLALSSAREAEREAKRALFEARRQLRESGAVDAALADIEARAGELRRGARALSGVHWGTYSLIEAAHDASRKMPLYDGVEPNDPRFARWEHEGQVGIQVHQKGSTGTGMVAEELHAGIGGEWLRVERVHDTRQGRRAGTRARLTMRIGTSDVDGTPIVAAWPMVMHRAVPPGAIVRRATVSLRRRGPREEWSVELTIQVPSTIAPEERQGHVAINVGWRSMGDTIRVASWVGSDGQKGELHLSKRTIEGLRKPEGLRSTRDKNFNDARNALLLALAGLNVPEWYTLRAKALSQWRSPQRLAALATEWKTKRFAGDESAYLALETWRYHDHHLWAWEASQSVGSHRHRREVYRVFGSQLAKRYRTLVLADFDKRVVAIRPAVGDANDKTQNETARSNRQLASTSELEREAANAFTSRGGTAEYLSAVDITHTCADCGALSTFDAAERIHAACSSCGVVFDQDENAARVLCERWRDGEKVGVARVAEPQEKVGSKWQRAKARKEERQAARKAVASAAE

SEQ ID NO: 183 - protein, 634 aa, Unknown
  Description of Unknown: plants-endosphere-populus endosphere sequence
MAFGNKSKPTRKYNYGCRGFLSGPREINPDGTKALRQRFDGHDLAVTQMKLAHQFQNKLVEIERARREAIDPILVRHFPALTTLHNAAQEQQERLQELRDELSQSNSQNRQLMSDPELVEQINAQKRVVSQAWEFYSDQRDAAFADPKVKADLKDNDKSFEQRKADARNAAVEGGLYWATSLQVVGRVKRTGPPPKFKSWRGEEVISVQFQRKPDKTSPKEPVLDSKGNPKIHPRSKKPTFAHVGGSSLRTCDVFTPNTNCWIERTYQPPLTAPHPKYVVIHFRVSSDEKGKPVMASIPAVMSRPLPEDGEVKWVHLSRRKIGTHYRWDVQFDIARDAWTYHPAGQDRAQEGTVAVALGWRLIDGEIRVTEWVGDDGVTGTVRIPKELVEGWSYLDTLQSIRDTLFEAERAELVDWFVNYPNPLPEEWTERAQTLIQWRSADRFMWLIWWWKDHRIPGDEEIFQRMWGRIQLNPTTGRNQYTGGRLQSKHLCDWRAHKRDKIKNWRKDFFRKVAIDLSYQYKDVVIAEIDWNKLAENPEVENGNDIVNKRYRALSSCAQLRDEITRYMNEVTESARNIVTTCCQCGESCDHPKSGRWIRCESCGGEKRDRAVNAATNLLNRALGASGAKVPARV

SEQ ID NO: 184 - protein, 648 aa, Unknown
  Description of Unknown: plants-endosphere-populus endosphere sequence
MVAAKISHLLEFPSMAFGNKSKPTRKYNYGCRGFLSGPREINPDGTKALRQRFDGHDLAVTQMKLAHQFQNKLVEIERARREAIDPILVRHFPALTTLHNAAQEQQERLQELRDELSQSNSQNRQLMSDPELVEQINAQKRVVSQAWEFYSDQRDAAFADPKVKADLKDNDKSFEQRKADARNAAVEGGLYWATSLQVVGRVKRTGPPPKFKSWRGEEVISVQFQRKPDKTSPKEPVLDSKGNPKIHPRSKKPTFAHVGGSSLRTCDVFTPNTNCWIERTYQPPLTAPHPKYVVIHFRVSSDEKGKPVMASIPAVMSRPLPEDGEVKWVHLSRRKIGTHYRWDVQFDIARDAWTYHPAGQDRAQEGTVAVALGWRLIDGEIRVTEWVGDDGVTGTVRIPKELVEGWSYLDTLQSIRDTLFEAERAELVDWFVNYPNPLPEEWTERAQTLIQWRSADRFMWLIWWWKDHRIPGDEEIFQRMWGRIQLNPTTGRNQYTGGRLQSKHLCDWRAHKRDKIKNWRKDFFRKVAIDLSYQYKDVVIAEIDWNKLAENPEVENGNDIVNKRYRALSSCAQLRDEITRYMNEVTESARNIVTTCCQCGESCDHPKSGRWIRCESCGGEKRDRAVNAATNLLNRALGASGAKVPARV

SEQ ID NO: 185 - protein, 488 aa, Unknown
  Description of Unknown: plants-endosphere-populus endosphere or plants-rhizosphere-populus rhizosphere sequence
MIVYKYGALKPKVIGGTFEDLLQYQRHSNAFYNALIEIERWRIAARDIVELAQSAPLSDEQKTEHRLAYNAACRAAGAATPIGWGQKQAVTEMVAAAMKTRRSDEFKARQRASKKGYDFLKRVMTCARPRHRRFDGEGILAATVQGATGLKASAVLTKPGPVQISGDGKHRTVTLRLREGLSLEVPIVYHRPLPERAEKEGVPYDVRVIFARLVIDRIGDRWTYSVHLTIDAAPRVHVAQGGLGRCAVNFGWRRVPGGIRVAYAVDDDGNETSCVFPDALLGRQKHAESLRSLADEIAAAYLGDAARRTKARCSALADPDAIHRELGREWFTMEQAAKRDGTDAEHWARRDRHLYQWERDEYASVLRARREIYRLWARKLAASYDSVIIEAFDMRSVVKRTPSEDDIPAARHYRFLVGPHCLRLEIQSVFGARCEVLKPAKRTLTCHACGALCKWDKARELRHDCESCGAAWDQDANNAKNQLLDAAE

SEQ ID NO: 186 - protein, 604 aa, Unknown
  Description of Unknown: plants-peat moss-host associated sequence
MTTLVYQFHLDPPVSGERAARQQMLAAHRYANDLIAIERGRRDALRAVHDTPAVREAEVLLKAATRSTRKAAVKALWAARREAERIASEVDETLPEVAAAKAALDALPKDAPARVRSVARQTLRAARAEAGDALARIQIFDEALRRGARALTTAHWGTYLSIEASADQARKAPLYADDALTPASPRFRFGARRGYLDESDARSVWWCARSQVGMHVQGRVCRTSGVFAGRDAWVRLEDAEPISHDHNTRRAILALRLDVDTWVRWPIRMHREIPDAARWSWVRVSCRPQQGARGKELWSVEITVDDTAPRPRELAADTLRGAVAVELLWSPLDDGTMRVARWLDSEGKRGEIVLPRELVRGLGEIPSGIRSVRDQLLNDLRPKLTRALRECTETMPTWLREAGATLHLWKSPSRFVDLARRWRASKCDAARAAYELLDAWELRDTHLDDYENGTRARSLRRRREVYRVLAARWAQSYATVLVPDRDLSREARWGEESERRFLASPQELRDCLRKAFGDGAVDVPWRGPHGVVDDGDEDADVPEWLEKAIEQWRDEEKSGSARKGGKEKKNGEVAMSAWARRQAAARDRDLGKETARKAANNDAE

SEQ ID NO: 187 - protein, 683 aa, Unknown
  Description of Unknown: plants-peat moss-host associated sequence
MKIVYRYGLRAPIGHTPTNPTSKEVCKCPVCEQLFLAHSYANTLTEIERGRRAAVRALHAQVGDTGALELAVTEANQACEKAASNIKRLRAQAFSVLAQRGHTEGAAKRGTRVTPPEMARELADARKRKQEATTRLVEHRRKIREDPAMIVGEHEITERAKELQRSARKYAGVYWGTYLLVERAHGASIASLPLYDGAGPNDPRFDRYRGEGSLAVQIQQQTGDPAFTVEQLSGSDSRVQIQKEAGRLHTRLKRDEEGRVVREGPLVEMRRGNCIVARPQAVRETYSMVGDTMLRLRIGSENRAPVWAEWPLKLSKPLPKGAIVSWVTVTKRMTGPREEWSVQFTLDTVDEVVQRDVDEEDARVVAVNFGWRLMGEELRVAYWRSETGRNGDLRLPASMLAIRAEAEEVQSRRDKEFDETRARLCKWLASTEVPTWLRDATKALAQWRSQARLVHLAKGWRVQRFAGDQEAFETLEAWRYHEHHLWQWESSVRATAVRSRDDLYKRWAKILADNFDVLVIAGDFDVRKVAERPEVDEEIQGPAAAATSRQFAAPGRLREILCHAFTKAGSKIAKERGADITRTCQVCGLVEEFDAARSVIRATPCSGCNATWDQDDNACIELLARYDRTCEKSKNTSSDDGARAEPKNETKKAAGSHWDRARQKKVEKLKKVEAARQALENTG

SEQ ID NO: 188 - protein, 698 aa, Unknown
  Description of Unknown: plants-rhizoplane-corn rhizosphere sequence
MEPVKKSNARKTSTSETKVYSYGAFLPKESEQIKLINDQLYFAHKYRNKLVEIERKRRNRFRNLRKLMSPELRQLENDLLLTEEKIIELRKSFGGRAENSLDPKFPKKNRQLTPQAVEIKDLKLKKKDLSAKIKSIHTQLNLDYFKEADSKFSLLKKERLEQKAKELNKDSLGPNDVNRHNVVNNLYKEMIDGGNRFWAIKAKISKSAEASNKRARSNCKCSSGTYVSIEEAAKQSFSNSKFEPKFKSFDGSGKIGMQLTQNKGLSIKDALSGSSPVLKIDLHPEVYLRQNKKKNKVLATARIKLFGTEKTGKFVDIPFIMHRQMPEDATIKWVFLVVSKIGYRSIYNIQFTIESNSFTQPSAIRPDDVAINLGWKVNDQTDDITVATSFDGKNYNELILPSKMRANIVYKETLISHADKHFDSVKKDVSKWLKNSNLDECITKYFTNLPQWRSHKKLLFVSKELAKVFLPDNTWYDLWKKWKTHCKENKPWKNCSDKDDLFTTLDNTIQWCKDNSIDDPNVQMAFYLKTWAEKEIHLINWARGIESKLRKHRKEIYRCFAKKLSSTYGKVIVENWDKSKTAETPDVENDNRTKQEENANAVRQFVGVSVLTDALKQKFGKDFCEENAKNISKEHFKCGGELINQKELSDVHCKKCNKSVNVNYNAAAHLFDRHGERSGAVKLPGTARKTRKSPELLA

SEQ ID NO: 189 - protein, 637 aa, Unknown
  Description of Unknown: plants-rhizoplane-miscanthus rhizosphere sequence
MRIYAYGARPPVENAELVFEQLRLAHAYQCALVAIERRRRVVVDRLYQSACPAEWNAYEAATARVQEIIPRMRMTRTRPGDMLPPDMEMQVEEREIVKQIKADLAAAREAEQVARQAWYAAKKMATPRLRARLRMCDRGAYARAKRAYNLASAVGLAWGTRLKIAESVERAGKAAAKHGTLPHFPRFDGGGTIAVQIQGGLDAEAVFGGVDTRFRLNVVDAATWNALQGKSATQSVKKSGRVVDLPQPIEGSRRSTLRRGPIARLRIGSEGRQPIWAAWPVTLRRGLPLKALIKWVQIHARKIGSRTEWQLLVTVDDAKPAVHAEGPILAVNLGWRNLEDGGLRVGYAVGSDGREEEVRVPPRYTSGVAHVDSIRSIRDKLFEAVKEFLSDWSDESPRPPDWLVDATRHIDQWRSPARLVTLLREWERKRFVGDRKTWERLSAWKTKNAHLRFWECDERRKLLRMRLDFYRCLAARWASQYARVVVTDMDLRDFAKLPEPEEAADTEGQTQRRSRVLAAPSELRGAIKNACSTRGTGYEEKKAAWKTQTCNACGVVFAFAAKQDLLHICECGARWDQDANHCRNLLASGPVLHGAMGSLAPTGKQMESTDRPAVDGRWKKRRSRTTVEALKKTAKSA

SEQ ID NO: 190 - protein, 693 aa, Unknown
  Description of Unknown: plants-rhizoplane-switchgrass rhizosphere sequence
MPRARKEKSPTKIYTYGLLPPEHGGEDLMRMLRAGHNYRNALLEVERDRLAETEDFWAKRGRYTELVARVRELEAVRFPRKDDPRRQAHYDLIDDLREKVREKREATIQGSLPAEEGRRRLRSRELKAEAKKRGETLTKEQMTRLLDREPGCVSVRRKAQLDYEAQSRARGVEPSPKGMVAHLRALGLNTITQEIDDRATQKAKKAREHFKVYYGTYLLIEAQVERALEKTQFPRFKRWTGEGRVGAPVDTNFGLSVDSIHDCQFDSKHGWEENRGNTVLQIDPVGVSCAKGFHTRARVCVDSRGRSGSKRLSVWVDFRINYHRELPRGAKICGAWINIYTLGTRVKYELQLQVQDDSFQVQPRHGTGVAAINLGYRSSGRVAYVLSEDGKGRELLVSPRIEASIGRADTSRSDRENSANRMCDMLLGWSSELGFPEAFLVGDGESKIDTWSGSVTRRSRSLSTRISALKDAREESLSNKLRGILGTWAKLRQDKQTRPSDEATYAAFVEWFHQDKIYQNNEAFTRSGARNYRDQVVRDWAHELCDRYEMLLVDGTDYAKLKMRPKDKSVMPIENQTEIAHRRDNFAPGNLRSIIEEVARARGVTVDRHDPSGLTQRHHACGWDEPWDAMPRIEHKCAGCGETFDQDANFCVGLFERFRGILPPAPARSPRTSRKNRSSSGSERAGGGQEAAE

SEQ ID NO: 191 - protein, 586 aa, Unknown
  Description of Unknown: plants-rhizoplane-switchgrass rhizosphere sequence
MNRVYEYGLLDPVVNAQIVEDQLRAAHRYRNLLVEIERERRTRVREILSSHADAAPLAEDVARLTVELEQAQAKIKQVRAVSRRRSETTDDRMAVRDVTTRLKAAREQLKIVKAAVAQDPSCQEALAQAEQRCHDRRIEERARCGVFWGTYLLIEEDVDRARKGKMDPKFVRFTGEGRVSVQLQGGLEWGGIAEDTRIQIRDAPDPRQGRRAGTRKWLRLRVGSTGRDPIWAEWPLILHRPLPEGAVIKRATVTRWRRDCRRWEWRLQLILDVSRCVGTKPRGTEGACALNLGWAKTERGLRVGFVVGSDGERTEIVLPGSILDRLDKANAIRAQRDQNLDVMKPLLAAWIAAHPLPEVLHAKIEHLHAWRSADRFFGLARLWRQHRFDGDTEGYELLESWRYRDEHLQRYEAGMRRGALGHRREVYRLVGAALSRRYRMLIVDDTDLRTFQRSPAPESDRVEFDAVKRSQHVAAPSDLRMQLANAFGEDGVAELSAVDVTRRCHACLTLNDWDRASSGREHACVGCQQVWDQDVNACLNLLREWRTVAPGWEAARVAKASNRQASRAERLQQARRKKKPAEAIAG

SEQ ID NO: 192 - protein, 626 aa, Unknown
  Description of Unknown: plants-rhizosphere-miscanthus rhizosphere sequence
MPVIVYEYGLSPPKVNAALVEEQFRLAHKYRNMLTEIELERRTKIRAIMASHPDMVPFETELAEVQAEIEKLRGEINAIRMAARKRASTPEQSRRIKTLAARARELRTEIKERRKRVAAELAPDLKAIQDAAVQRRKDERAKSGVYWGTYLLQEAAADQARDQPMPPKFTRWNGDGRVSVQIQQGLAKEGLWGESRQVQIATRIDSLVYDHEVTRRGDRRRLYRTTLRMRVGSTDRQPVWAEWGIAMHRPIPDGAVIKVVTVSRRRCNSTQWWWRVQFTLDTTDCKPRQRPEYGVVACNLGFSQTDSGAIRAGYLVGDDGFEQEILVAKSDLYRGRDLTPEQKQKAMTYVRDCLAESSEIRGARDKSLAEFKTRFLEWYQIAKATTFGEDAIPEWFRDRMEHFHMWRSPARVREMMLHWASNRWAELDDPESRWPDSRGFEMMSTWVDEDTKAEVKESSLRNKALGDRREAYRIVAATLAKRYKTLLIDDTNLKHLQDGPEPEDAEGDIPAVKYQQRLAAGSELRQVLINAFGGTNVVKMKPSNMTVTCSGCGARDVSWDRADGFRKHRCSACREIWDQDANFCRNLLKEYARGEAPEAKVAKPSRSQRFHESRKKKAAADQQEQG

SEQ ID NO: 193 - protein, 617 aa, Unknown
  Description of Unknown: plants-rhizosphere-populus rhizosphere sequence
MATIVYRYGVRTRTETGRYDLPAEVWQQIHLSHRLRNALVEVEHRHDEAMRDLWSAHPQVAEVEQRLAAAEQMVAELIDQARLEHSQDRTTATRRGTATNLREARRAVRDARAARRAAIGEAYPVVKPGIEAVRAARKAAIKDLYREYCQDGDLYWATYNAVVADHRIAVQAVERKRRQGQAAQLRYQRWDGTGTISVQLQRQAGQPARSPELLASGDGQWRNVLQVRPWMPPEQFDGLTRGERKRHGRGEAVWSVGGGRTVTLPIQVHRMMPADADVCEAQLVVTRTGAHWSAALCVTVRLPDPDPVEGRSPLALHCGWRHRPDGSVRVGTWASPEPLVPPANLADVLAAHDSGRWGEIVIPASWLELAGRPAALRSRRDLALEPVQRKLAEWLDQNPQPDGDDGRPGLTGGDVRRWRSANRFAALAIRWRDTPPPGEGAAEMTAVLEAWRRQDKHLWEWEAHSRARLRGRRDDAWRKVGAWLAEQAGVLVVDDVDLAALRQRGDVADDDPVLPGTAAGQARARAALAAPGRLRQCATGAADRRGVAVRTVESGYLTRTCPHCGERGDAHPRYAQSAVVTCPSCGRSYDQDRSAATLMLDRERSGDGPGKGERSQQ

SEQ ID NO: 194 - protein, 646 aa, Unknown
  Description of Unknown: plants-rhizosphere-populus rhizosphere sequence
MKRRTSPLPTRIWSYGCLRPTTNTDAFFDQLRKAHVYYNTLIEIERDRRAEYRKDRAKLCPDIEKFEAEFLELDKAVDLFRATMKAEKKKKDDTGELKRLKDARKAIGEKLKALRLEMKNSPELKKLQEKEKEVVSGKVRAARKSSGVYWGTYLLIEKAVETARRSKMDPRFAKWRGTGRIGIQLHHVKWSDIVDGKSQMFQVDPLPETQWDTRKGRRHAYTKARVRVGTEKSATTGKQVPVFVEVPLYLHRRPPADAKLTWAWIFVTRKGPTLRYQLQLSVESNLFSAGLPEQPKKSVCAVDVCWRKMDHGLRLGLAVDHHGNQFEMVLPKAVPELIEMGDNMKSAADRIFNGTKDFVSKWIKENGLPGAIEPARVSQWLSHRKLRGLTRQWLAETIGFERARELWRAWCFERVGSRKNPLTVPKKDLFAPAEEAFAWAEKHGLTKPFEQMAFYLELWSRKDRHLEQWAADQFYRATMIRRDAFRNWSRFLVNNYETILLEDMTHTTFAKDSVVEAEKSFDVLHRQRNEAAPGLFMQTLRSAVGAHVVPMDPADTTNDCAHCRHRNDWSQTERSKNVVLTCAGCGKMFDQDANAARTMLIRYFEGDTGSGGSKDKPKPASPPPSKPPPRALTKRRKPGAEPRASV

SEQ ID NO: 195 - protein, 710 aa, Unknown
  Description of Unknown: plants-rhizosphere-populus rhizosphere sequence
MTEKPPTKIYTYGLLQPTKNGHEFSKMCRAAHDYYNALLEIERTRQREEDDFWAKRGGYVDLLDEFRQLEAMRPRRDDPKREEIFARRKELRKKLWELRDVTVDRSLPIEDANRRNRHRELKKAAKAEGRNITDAEISASLDKDPSCVSPRRRAQLEYTEEAKARGVNVSGRGLNQYLRDRGLLKVTQPIDDRAAEDQKRARDHFELYYGTYLLVEPAAEQAIERSEMFPAFKPWRGEVGRVGAPVNTNTGISVEAIHNCFNEDPKTGERTFSDGGNTVLQIIPIRKEVRESRRVRVKGAPSAHQQGMKFLNQTVMRICVRSEGRVGAQRIPVWVEFPMQYHRDLPPNAKVTAAWVIASQLGTRTVYKLQLQVQDEAFRNPVKPCGRSTMAVNLGYRSTGRVAYALTQDGRYEVMDVKDRVGKCIDEADELRSLRDRDANRMRNDLFEWRDVEAYPQSFLEGDGEKFVPHWSGDEKRRRSVKVRSMKTRIDGLVHARDDSLPTRLRAIYETWERMREQGLLRSVDDRIFKVFREWYIEDKRSQDKEAHQRLNAHGTRELDIYAWAHRLCDEASLILVEDTNYATMKLKSNRRPKEELPVEISVSIARRRDMYAPGRMRKILEQVAVKRGVKIVRLSSVGLTQRHHKCGFDEPWDAMRSIQHKCEGCGVTFDQDRNFCEGLFERYRGTLPAAPARKAGKGKKSRDLPAEAE

SEQ ID NO: 196 - protein, 713 aa, Unknown
  Description of Unknown: plants-rhizosphere-populus rhizosphere sequence
MRSMTEKPPTKIYTYGLLQPTKNGHEFSKMCRAAHDYYNALLEIERTRQREEDDFWAKRGGYVDLLDEFRQLEAMRPRRDDPKREEIFARRKELRKKLWELRDVTVDRSLPIEDANRRNRHRELKKAAKAEGRNITDAEISASLDKDPSCVSPRRRAQLEYTEEAKARGVNVSGRGLNQYLRDRGLLKVTQPIDDRAAEDQKRARDHFELYYGTYLLVEPAAEQAIERSEMFPAFKPWRGEVGRVGAPVNTNTGISVEAIHNCFNEDPKTGERTFSDGGNTVLQIIPIRKEVRESRRVRVKGAPSAHQQGMKFLNQTVMRICVRSEGRVGAQRIPVWVEFPMQYHRDLPPNAKVTAAWVIASQLGTRTVYKLQLQVQDEAFRNPVKPCGRSTMAVNLGYRSTGRVAYALTQDGRYEVMDVKDRVGKCIDEADELRSLRDRDANRMRNDLFEWRDVEAYPQSFLEGDGEKFVPHWSGDEKRRRSVKVRSMKTRIDGLVHARDDSLPTRLRAIYETWERMREQGLLRSVDDRIFKVFREWYIEDKRSQDKEAHQRLNAHGTRELDIYAWAHRLCDEASLILVEDTNYATMKLKSNRRPKEELPVEISVSIARRRDMYAPGRMRKILEQVAVKRGVKIVRLSSVGLTQRHHKCGFDEPWDAMRSIQHKCEGCGVTFDQDRNFCEGLFERYRGTLPAAPARKAGKGKKSRDLPAEAE

SEQ ID NO: 197 - protein, 558 aa, Unknown
  Description of Unknown: plants-rhizosphere-populus rhizosphere sequence
MQRQKDDSITSRVYVYGCVPERVAPVHNEDRALEQMRLGQRLWNVLVAIDRARVARYRRIMADEAQERIDALRDQAAALRDEIKTRRKQARKRSVDIGDLAERLAAVKSELSALIEEQKRTSTERHDARRAELTAMQERTNHRIKRARQAAASLGLFWGTYNDIVQRSDAGRKHGGELHFRGFRGEGTLTAQIMGGAIVTRCVEGAHTFFQVDPPQPGRKWRYARMRIGSEERGGVKLAPVWLEIPIVYHRDLPPAGMIKSVSMTRRMLAGKPRWQLNVTLNLPAPKPTTRTAAVAIDIGWRLLPEGVRVAYWMDDAGQHGQVLIPSRDISQFERVRSLRSNCDLSRDEILPGLAEWFGGLELPAEWAQRVAYLSQWRSSDRLAGLYDWWRDHRLPGDAETFEAYTTWRKQYLHLAHWWRNLQDQMTLRVREQYRVFAAQLAGRYGVVYIEDFDLSSVARKPKTEGDGEKSASSTYRQMVSPSMFRGALLNALQREGATVTELPAEYTTRICSTCGYGREWDQAESVMHRCGGCGEMFDQDENAAKNLLRLVAQGVAG

SEQ ID NO: 198 - protein, 597 aa, Unknown
  Description of Unknown: plants-rhizosphere-switchgrass rhizosphere sequence
MTTLAFKYGLGDPLDWDTDIADQLYLQNKLWNRLVEIERDARTRYRAVVGEDDAIAPLVRDIEAAKAQKEALLTERKGLRAKARKRVPTPEIDARIAECATVVRELAQRIKTERVAAKERLAPHVRAIEEWRFGAVKEARNASGLWWGNYNAVCASYDTARSRAMKDGAELQFHRFTGEGRLTCQIQGGTTPEQIVDGKCSLVRVDPLSAGAHSHPSRGERRRLQRTKIAVTAYMKDGERRLLTLPMQMHRPLPDGAIVKQVVVTRRKIGTRYRWHAVFTCSVPDAQPVQHASTSACGVNFGFRQVLGGLRVATVSTSPSKTPDYLVLPEEWLRAMDRCEALQSARDEHLLPMHAAARELTRGEDAPESLRDKLDRIARAPKIGSALLASLVLAWRDTHADWQSDKLVGFEAWRRNDKRAAEEQANLRDKLHASRTERYRLWARELVRDHALVGCGKIELRKLAELEKQDGTENDLHARARSNRQRVSLYSLQLELARAAQLAGARVVMADGPLTSTCHACGATTLIKPDIMQVCDHCSAVWDQDHNAALNALSYAQQSPPPRERSGDAQDTDQENQVFGEPAEEKKDSARNVRLAA

SEQ ID NO: 199 - protein, 635 aa, Unknown
  Description of Unknown: soil metagenome sequence
MHSRVYLYGLLPPTPACAPLVEQQMGRAHRYRNVLVEIERERRAKVREVMAAHPDMAPLEEQVNALVAERETALQALPRKAARNDPARANVRAMATRIRDLRGQIKAARKAVLADAEVARQLAEADEFSRERVRRARATCNVYWGTYLLQEADADRARMERMPPKFHRWTGEGRVSVQLQGGLEQDKMWGGDTRMQIDPVAPEAHDPLSPRGVRRRAHRTVLRLRVGSDAQRGPIWAEWPMLMHRPLPKGAIIKVATVSRRYRNCTTWDWQVLLTVSIPDESARPAPAAGVVALNLGFCERPDGSLRAGYLVGDDGWTQEIVVPASTSELLGKCDSIRSFRDKNLDAMRPLLSAWRQDQNLAFERVCRDVIAACETTPPELDGAFYRLAMYIVNGGHSLPSWLHERIQSVHAWRSHDRFRKLALTWRDRRFPGDHAAYELLEVWRYRDQHLEHYESGMRRRTLLRRREGYRIIAAAAAARYRTLLVDDTDLRHFQRKPDPEDGATVPEQIGLATMRVNQRLTACSGLREALASAFGSRVVKMSSQNVSRRCHACGDINLAMSSAREQTCTGCAATWDVDQNACLNLLGEHRRDDPDRETARVAKLANAKPSRGKRLSAARASNGATVLAREASGN

SEQ ID NO: 200 - protein, 628 aa, Unknown
  Description of Unknown: soil metagenome sequence
MKRRTSTAPVRIYAYGCRLPTQGGELVEQQLLFRHRYYNKLIEIELDCREKMRAARSASSEDVAHAESAFAIYETEIVGVLDAIKAKKGAARAAKVDAAEERAVLAVLRDMKRKTIDDLHAAKLAARTPELLAEFTAIQEAANAEVRDARSKCGVYWGTYLLVEQEVEQAVKAARKNHEDPGFRRFMSVPNRQGQATIARGRVGVELIHGVPVATIMAGTDTRLQIHMEKSDSKRGQTMARAKIRVGTAENGRSPIFAEFPFRMHRPLPADGVVKWAWISKSTKGRWVDWSLQIVVEAASLHRPVRQPSDGGVVAFDIGWRVRLHEVVNELRVAYWHDDQGNHGELVLPSDDRVRVDSRGRKHRPEGVRGRFDHVDSLRSIEDKNFDAIRSELVAWKTGRDLPEWFVSALEWLHAWKSHRKLGAVFDQWRSNRFSGDDGMFAKVETWWKQHRHLYDWESCERDRALNARKNTFRQWAPQFTRKYAVVVLEEKFLAEVAKLQAPDSTKANMPRPTRRNRTVAACGEFVLALKNAAPGNGCTVDAEPCEDTTATCARCGYVERFDHRPLAHACARCGDVSGPVDQDRTAAENLLAAYAGKMSRSQSASEGGNIVGDPDGSLVIPAQEGVS

SEQ ID NO: 201 - protein, 617 aa, Unknown
  Description of Unknown: soil metagenome sequence
MIRVYRYGVASPHDGADLVYAQMRGAHAYRNTLIEIERGRRGALRDLESAEVRGLTAEVAAADEACQAIGSTIKVARAESRKRSERKVDLERLAEARSVKRAITGRLYEARRNHMLATRSAVDIVNELAKCLLKSAREHCGVYWGTYLLAEEAMGASSSAPLFGKDGITQNDPKFIRWTGDGAVRVQIQKGASVAAVRADAEHSQLQIREPTGAWSHPTRSERRRLAKRGEVRIRVGSEPNGKPVWAAWRLDMHRPLPEEARIKEATIHVRQRGAHSEWSLLVTVDVPPAAVVPSESRGEAVGVDVGWRLIDGCIRVAVCMGAGGAVTELRLDAPTIRLLRSSEALRSKRDERFNAAKARIRKAAAEPVAPEWLRESGKTMHAWRSPQRLAQLHARWAEERFSGDDMVFGRLEAWWWTDRHLWSTEAQASLQGHRRRKDIYRVFAAKLAARYDVIVLEKFDLRKVARTEETGEETPAGDNDTSRSNRQLASVSEFRACLLDAARSRGRSVVMVDASETTRTCHVCGLVEAFDAAAHLRRTCACGSEWDQDENAAEVILARWRERPGDAKILVPARSTEIYCETMELLETRWQRVARLRKEKLARMDTARKSASNAAE

SEQ ID NO: 202 - protein, 595 aa, Unknown
  Description of Unknown: soil metagenome sequence
MMVFKYGTVPARIAPVIGAEQAAIQLRLANRLWNLLVAIERARVARYRKVMFDAAQGRIELLKAKLSALRGKIQVRRQAGRRRVDVSDLTAESQEIRAAIKAEIKAHKATSAERHDARRAELDALSETSKSRIKRARQAAASMGLFWGTYNDIVQRADVGRRAGELHFRRDTGDGTLTAQIMGGADPEECMTAHSFFQIASKCPLSGLVAGDVAETDAQPVKWQYARMRIGSTGERQPIWLAIPIVLHRPLPDGARIKSVSMTKRKTTWSLNVTVAEPAPTPKLIGPRVAIDLGWRVVPSGVRVAYWADTLGGEGQVVVSDEDIGQFGRVRSLRSRCDTMRDEYLPVLAAWTSGRELPAEWQAETIALVQWRSPDRLARLIRWWARLPGDAEMFSRASAWRKQYLHLANWWRNLEDQMRGRLREQYRIFAAGVAKKYSTVYLEVFHLPDVIETPAAESEEVRTAESRYRQMVSLSVLRAAVRNACTREGCTVVDVAPEYTTLGCHLCGTITEWDTAASLMHQCKGCGAVWDQDQNAAINLLARGASGGAPPTANQPDRPRKWDRVRDRSRKSAQAAESAILAAAAVEMPAQRLSC

SEQ ID NO: 203 - protein, 638 aa, Unknown
  Description of Unknown: soil metagenome sequence
MTKPLSGLVAETGLLFRAFRAARPSSKCLLSGLVVETECDNVVMMVFKYGTVPARIAPVIGAEQAAIQLRLANRLWNLLVAIERARVARYRKVMFDAAQGRIELLKAKLSALRGKIQVRRQAGRRRVDVSDLTAESQEIRAAIKAEIKAHKATSAERHDARRAELDALSETSKSRIKRARQAAASMGLFWGTYNDIVQRADVGRRAGELHFRRDTGDGTLTAQIMGGADPEECMTAHSFFQIASKCPLSGLVAGDVAETDAQPVKWQYARMRIGSTGERQPIWLAIPIVLHRPLPDGARIKSVSMTKRKTTWSLNVTVAEPAPTPKLIGPRVAIDLGWRVVPSGVRVAYWADTLGGEGQVVVSDEDIGQFGRVRSLRSRCDTMRDEYLPVLAAWTSGRELPAEWQAETIALVQWRSPDRLARLIRWWARLPGDAEMFSRASAWRKQYLHLANWWRNLEDQMRGRLREQYRIFAAGVAKKYSTVYLEVFHLPDVIETPAAESEEVRTAESRYRQMVSLSVLRAAVRNACTREGCTVVDVAPEYTTLGCHLCGTITEWDTAASLMHQCKGCGAVWDQDQNAAINLLARGASGGAPPTANQPDRPRKWDRVRDRSRKSAQAAESAILAAAAVEMPAQRLSC

SEQ ID NO: 204 - protein, 628 aa, Unknown
  Description of Unknown: terrestrial-soil sequence
MKLVYKYALASPHENFDLIDLQMRAAHRYRNTLVEIERGRRAAVRLVEAEAGDMPAAQRALTMAIGARELADGAIKRHRARSRKRDEPQEMRDTLRAARVAERDAAKAFRELRLKIKDSPAMIAARDAIGERAKELQRSARANCGVYWGSYLLVEGAVSDSFSDTSLYNKDGHANDPAWARWTGEGSVGVQIQTATADKATKSLTVERAASGNDSRLRIVLPDERAWDRSGRTHRECENMARQAQLSIRIGSNGRDPVWGSWRMDMHRPLPVGSTIQLATVHRKRVGPYDRWHVTFTLDVPASTRASTAGTGTIAVDVGWRVMGDELRVAGWQDDTGDRGELRLSAKDLAVLRAPEAMRSARDLRFDAARLALSVWLRDHREILPDWLRVISANVHAWKAEARMVALRNRWMDARFADDEAAYDALTNWAFRARHDWAVESCARGQALRRRREKYRVWAAQLATKYDTIVIENFDKRRVAATSRDATTENETARANRVLASTSELVSCMETAARSRRAALFAVPCADTTRTCPTCGLVESRDAAAAVRLECECGARWDQDVDGAPLVLLARWRERPGDAKIVVSAREQEKTNENGEKKEGRWAKVARLRAEKVARMATAREADADGAE

SEQ ID NO: 205 - protein, 660 aa, Unknown
  Description of Unknown: terrestrial-soil sequence
MWSIGASVATRCCRRRPSDRYGSDKRNKEIVTMKLVYKYALASPHENFDLIDLQMRAAHRYRNTLVEIERGRRAAVRLVEAEAGDMPAAQRALTMAIGARELADGAIKRHRARSRKRDEPQEMRDTLRAARVAERDAAKAFRELRLKIKDSPAMIAARDAIGERAKELQRSARANCGVYWGSYLLVEGAVSDSFSDTSLYNKDGHANDPAWARWTGEGSVGVQIQTATADKATKSLTVERAASGNDSRLRIVLPDERAWDRSGRTHRECENMARQAQLSIRIGSNGRDPVWGSWRMDMHRPLPVGSTIQLATVHRKRVGPYDRWHVTFTLDVPASTRASTAGTGTIAVDVGWRVMGDELRVAGWQDDTGDRGELRLSAKDLAVLRAPEAMRSARDLRFDAARLALSVWLRDHREILPDWLRVISANVHAWKAEARMVALRNRWMDARFADDEAAYDALTNWAFRARHDWAVESCARGQALRRRREKYRVWAAQLATKYDTIVIENFDKRRVAATSRDATTENETARANRVLASTSELVSCMETAARSRRAALFAVPCADTTRTCPTCGLVESRDAAAAVRLECECGARWDQDVDGAPLVLLARWRERPGDAKIVVSAREQEKTNENGEKKEGRWAKVARLRAEKVARMATAREADADGAE

SEQ ID NO: 206 - protein, 628 aa, Unknown
  Description of Unknown: terrestrial-soil sequence
MSEQLDDTPEQPNEVEETKKRKQRNKGKHPARIWSVFSRYLVSGREHFDKQVLLAHRFRNKLVELELQRRAAANVVIAQASSELQPLIDALAAAEQVLEVSLQELKAVRAKHRRRAESAAQRDAVTNARTARNQASKALSKARKDAFASEAAQVGLWLAEEHHFQAVLAARHAFINDGLYWPTATDVQDRARAMRKGAPPVFRRFGGAEQAGRIAVQIQQRTDKSQSEGGITFEEAFSCSHGFFRLEKKPGRDPLPEIADQPDYKSKRQQLLTYARAWLRVGSEGKGARAKPCWVVADVLLTRQAPKTARIVQVYLDHSVIGDRERWRLSLVLTNQEGWPKPNRASGCMVGIDLGWRLLDTGELRVAYACGADGQHHELRLPASLVKVWRRPDRIQQERDNLFNDVKARLLEWLKGREDLPDWLKEQAEHLHLWKSSTRLSRLVDHWAGRDINWSSQRRIAGDEEILASLRGWVKRNLHLRDYQYHEREQLAAHRLDVYRKWADGLARLYQTAVLEDADWRDLARLPSPEDDAVNETARYNQRMASPGLLASVITNMFAITSRVECANTTRECWRCGHTEAFDAEAQLIRVCPGCGDACDQDESAARVLLARGQALNQSQVAEAAPSS

SEQ ID NO: 207 - protein, 622 aa, Unknown
  Description of Unknown: terrestrial-soil sequence
MAVVVHVYGVPPVLHGERVRLPAEVDEQLSLAHCLREDLVTLEHQRQDAVTAVWSSYPQIAAIETQLTAAETELTDRSAAAAAERSAARKKGPTESSEAVRQLKARIKDLRSQRRTAIADAHPTATPRLTAIADAHRAAIKALYADYSQGRGLYWATYNDVVAHHQVATKRVAAERKAGRPANIRHHRYDGSGSITVQLQRQTGAPPRLPATIADEQNGPWRNVLYLTPWVDPDTWATLARAEQRRRRLGVVRLDLGNKRHLSIPVLVHRMLPADADITSARLVVRRVAGHRKIELHVTARIKDPVTRSGGPAVALHLGWRREDGGAVRVATWRSTAPVHVPDDLNDLVHADTDHTGTISLPARWWHRVSTQPEMAARRATSLNDIRDQLVAALTDNPLTITADDEDAQPVPTAAAVATWRSPARFAHLARTWATDCPAGHQATAAALENWRRSDRRLWEQQAHGTANTLAARADAYRRTMSWLLTGASRLVLDNTAIADLARRADPATEPTLPTAVTDRVAHQRIGASPGQLRSIATTTANSYGVAVAVMPHTGITRTHYRCGHLNPADDRYSAARIVTCDGCGQHYDQESSATLMLLAASGDVAAPGSATARNPDTSAHA

SEQ ID NO: 208 - protein, 605 aa, Unknown
  Description of Unknown: terrestrial-soil sequence
MTTLEARVAQYGCLAPIENADVVRQQMRLGARYYNELIALERCRRAVYRDLRRKYVDLESVEARVEELAAELMSLREAIKGVRKEARRRVDTADLDQRAKDVQSALRVARVALKDARQAARDNAELRAAVEQLDERAKIWSKALRAMRAPWWGTYLLEEASAEQARKATIDPSFRRARGRERISAAGEGSAEGRIGVQVQGGMTVAELYGCEDTRLRIEPVSPDAWHASSRGVRRRCSRTRLWMRVESAGRSPVWAVFPLILHRPIPDDARIKGAVVRLRVLGFREQWTVSVTYAREPAVMPERPGIVALDLGWRQRPDGSLRVAYCADDQGNHREVVMPESVRMRLRKARDLREIQDLHFNRAVRWLARWLDAGKAPEWLARERPHLGQWRSHGRLRRLVLDWRRTRFVGDERIFAAMERWLHRSRHLYQWEVDAQRKALLARRELYRCTAAQIARAYGRVVIEQFDLATAKRLKAPEQGEDAPLAQRAQLHASAPGEFRQCLTQAVQREGGLVISVDASGTTSHCHACGGVCSWEQGEELWHRCEYCGELWDQDHNAAINLLRRFTRDHSGDATNPAPARKPSKRAERFRKRHAQPAATDVAE

SEQ ID NO: 209 - protein, 596 aa, Unknown
  Description of Unknown: terrestrial-soil sequence
MELNAKPDDLELDDDIPAGEEEEEKPDLDARVAQYGCLWPIQGEDLIRQQMRAGHQYMNNLIFIERCRRTCYRDLRREHANITEIEDLCQTLAHELDELRDQIKGARKAARSRVETKELNAKAAEVLKRLQPARKELKAARTAAAQNEVLKAAVKELDARVLLCQKFLRKQTDCFWGSYILVEASMKQVKKSKIDPYFRRWKGEGRIGVQIQHGMTVQRALDGVDRRLRIMPAPTSFLGENKSASHARHKARHLLYIRVDSEGRYPVWAVFPMIMHRDMPPDALIKGVTVHCRKRGLRDKWSCDITFTKPAVKPAKKPGVVAIDLGWRKRPDASLRVAYWVGSDGQDGEIRMPERVSRRLRHSDGLREVQDLSFNRMKSRLKLWLNAVDARDETLDKPMVPDFLTAIQPHMDKLRSHERIRKLVKQWEHERFEGDEHIFWAVKQWFRSSIHLYPWEVSQRKSTLRYRREMYRLAALELSKRYGTLVLENFDLSKAKRKNAPEQGPDAPKAQRTQLHASAPGEFRQALVQVFLREGGEVFRVDAMGTTSSCHACGATCKWDQAEEISHRCEHCGTLWDQDYNAAKNLLLRYALPQAS

SEQ ID NO: 210 - protein, 488 aa, Unknown
  Description of Unknown: terrestrial-soil sequence
MIVYKYGALKPKVIGGSFDDLLAYQRDSNVFYNALIEVERWRIAARDIVEMDQAGPLSDEQKTEQRLAYNAACRAAGQASTIGWGQKQAVTEMVAAAMKTRRADEFKARQRATKKGYDFVKRVMTCARPRHRRFDGEGLLAATVQGCSGLKSSAVLSKSGPVQISGSGKHRTVTLRLREGLSLEIPIAYHRPLPERAEKEGVPYDVRVIFARLMIDRIGDRWIYSVHLTIDAAPRAHAAQGGLGRCAVNFGWRRVEGGIRVAYAVDDEGNETSCVIPDSLIGRQKHAESLRSLADEIADAYLGAAARRTKSRRQALASPDATHPGLGKIRFTLGQAANHAPEDAEHWARRDRHLYQWERDEYASVLRSRREIYRLWARKLAASYDSVIIEAFDMRSVVTRAPNKDNIPAARHYRFLVGPHYLRAEVQSVFGKRCEISKPAKRTLTCHACGALCKWDKARELRHDCESCGAAWDQDANNAKNQLLDAAE

SEQ ID NO: 211 - protein, 711 aa, Unknown
  Description of Unknown: terrestrial-soil sequence
MIKNYEYGLLDPTANAQLVDDQMRAAHRYYNQLVEIERERRAEIAAILVGHPDTEALAARVADLARQREEARLAIKATRQATRDRSETSQMRDRVKDLATELRAARATLKTARDVIKTDAVIVAAISACDDRATTRVKARRAACEAYWGSYKLSEEAVDAAKKAKAPPHFKRWTGDGRVSVQLQGGISDGELFGTDTQVQVAPVSPDAHDLRKPRGVRRLASRTILRLRVQSTEKGRPIWAEWPMILHRPIPEGARVKIATVSRRRRDCRRWDWRVLLTLEIPDGASEHRRLIPASGAIALNLGWCKRPEDAVRAGYVLSDDGVIDREVIVPPSTINRVEKSEAIRSQRDKDLDAMRVTLVAWLRAHEAGLPAWVVERTILSREPRAVPQVDTPRAEAVRDASQRTRAWHVAQWRSAARFRALAFAWRSQRFDGDGEGYQVLEDWRYRDEHLERYESGMRRGGLLDRRERYRMLAADLAARYRTLVVDDFDLRTFAEIPKPEDESANVKPHRKQQRYAAGSELRAALLNAFGPTRVLRESSVDVTRACAAIVVDEATGAEHTCGQLDLWDHTVAREHTCSGCGATWDQDQNACKNLIGRWRERLGADGSVETARVATPRKESRSERLRRTRWKREPEAEAASTTEPHPSPSRVAPVAPATAAPTCQKSPIVTDGAATITATAPPPSPLRAPSPVVPGQSAVRANRPIAAPG

SEQ ID NO: 212 - protein, 745 aa, Unknown
  Description of Unknown: terrestrial-soil sequence
MEISRASGSHRVMPMCTQPVHACQCLQERATWDHVIKNYEYGLLDPTANAQLVDDQMRAAHRYYNQLVEIERERRAEIAAILVGHPDTEALAARVADLARQREEARLAIKATRQATRDRSETSQMRDRVKDLATELRAARATLKTARDVIKTDAVIVAAISACDDRATTRVKARRAACEAYWGSYKLSEEAVDAAKKAKAPPHFKRWTGDGRVSVQLQGGISDGELFGTDTQVQVAPVSPDAHDLRKPRGVRRLASRTILRLRVQSTEKGRPIWAEWPMILHRPIPEGARVKIATVSRRRRDCRRWDWRVLLTLEIPDGASEHRRLIPASGAIALNLGWCKRPEDAVRAGYVLSDDGVIDREVIVPPSTINRVEKSEAIRSQRDKDLDAMRVTLVAWLRAHEAGLPAWVVERTILSREPRAVPQVDTPRAEAVRDASQRTRAWHVAQWRSAARFRALAFAWRSQRFDGDGEGYQVLEDWRYRDEHLERYESGMRRGGLLDRRERYRMLAADLAARYRTLVVDDFDLRTFAEIPKPEDESANVKPHRKQQRYAAGSELRAALLNAFGPTRVLRESSVDVTRACAAIVVDEATGAEHTCGQLDLWDHTVAREHTCSGCGATWDQDQNACKNLIGRWRERLGADGSVETARVATPRKESRSERLRRTRWKREPEAEAASTTEPHPSPSRVAPVAPATAAPTCQKSPIVTDGAATITATAPPPSPLRAPSPVVPGQSAVRANRPIAAPG

SEQ ID NO: 213 - protein, 630 aa, Unknown
  Description of Unknown: terrestrial-soil sequence
MKEIRVYKHWAEPASAVDHHRLQSQLKLAYQYRRMLAMIENAARVAQRALVQADPAIAMLINQLAVLHEADPPATIVITAAQEALRLARRDLHKTDAYKLEARAIGDRRQVLVRGARGLFSAQGLAWGTYQHVEEAHDQSCSENPYWEDVKVRLTPGFGAIAVHIQNRVLPSGTLVGGRDTFVQIDAERYGLSTFRNGWRAIDPDGPSGRVQIPAGERRPCGGGAPRLQRIRIRTGSDGRAPIWTEFHMLLHRPLPPGKILWVRAHQTRVGIRTMYNIQFVVDIDTAGRAPRARPAGGAVMDDRAPQARSHHVGDATDDRAPQARSMMSHAIVGVDIGWRKLENGDWRVAMAVIPDGTTDELVVPHDVLRRADKSADLRSIRDQSRDAMRTRLLAFRETVVASLEDATPAPSADWLEATRTMHAWLKFGRFVRLRHWWAQHRFAGDEEIYSALCAWLDNDRHLIDWQEFNIRRMKRQIDGLYQAWAMRLARSFDVIAIEDMNLTDLKASSPGLVSDLAHERGMVVGLSHLIGWLKRATAGYNTRLVEVDPAYTTRNCRKCGFCRPASAELVIKCEACGFAEDQDITAGHNITARAVATLEEPTPEATPVKRRVRRTRRRPNEATTEPNNG

SEQ ID NO: 214 - protein, 669 aa, Unknown
  Description of Unknown: terrestrial-soil sequence
MIDRSEIDPGNRDAQLYQRGTTQLIDRLEIDPGANQGAIMKEIRVYKHWAEPASAVDHHRLQSQLKLAYQYRRMLAMIENAARVAQRALVQADPAIAMLINQLAVLHEADPPATIVITAAQEALRLARRDLHKTDAYKLEARAIGDRRQVLVRGARGLFSAQGLAWGTYQHVEEAHDQSCSENPYWEDVKVRLTPGFGAIAVHIQNRVLPSGTLVGGRDTFVQIDAERYGLSTFRNGWRAIDPDGPSGRVQIPAGERRPCGGGAPRLQRIRIRTGSDGRAPIWTEFHMLLHRPLPPGKILWVRAHQTRVGIRTMYNIQFVVDIDTAGRAPRARPAGGAVMDDRAPQARSHHVGDATDDRAPQARSMMSHAIVGVDIGWRKLENGDWRVAMAVIPDGTTDELVVPHDVLRRADKSADLRSIRDQSRDAMRTRLLAFRETVVASLEDATPAPSADWLEATRTMHAWLKFGRFVRLRHWWAQHRFAGDEEIYSALCAWLDNDRHLIDWQEFNIRRMKRQIDGLYQAWAMRLARSFDVIAIEDMNLTDLKASSPGLVSDLAHERGMVVGLSHLIGWLKRATAGYNTRLVEVDPAYTTRNCRKCGFCRPASAELVIKCEACGFAEDQDITAGHNITARAVATLEEPTPEATPVKRRVRRTRRRPNEATTEPNNG

SEQ ID NO: 215 - protein, 559 aa, Unknown
  Description of Unknown: terrestrial-soil sequence
MAYGHTALPAINWVYGCKRPFEGEELIRSQLRQANRYRNVLVAIERRRRTNFEQLVLRLCPELQKLETQRNNLTQEIIELRAAMKAENARQRKTVRNPESTRRIKELQAQRQLLRPRIKELRDATYTHPTVKVVDENAAAWVKRARAACGIYWGTYLVREATVKQAIKDARPGLPEFKRFTGQGAVAFQSQQGTSTALLEAGGGNNLVQMHWNEPRNRRGRRRGELWFRIGSDANRRPIWAKASISQHRPFPPDTVIKFGHLHLTKCGTRESWSVRFQLVRESGFVRTGLAAAGRVGVDIGWRRVPGGLRVAYWVGDDGREGQELLPEDFLASKQYVEELRSRRSLEFDAVRQRLATWLQMTSNVPEWLLDRTHSLAQWKSVDRLCWLVKAWAEQRFSVDESIFPVLWRWRGQSLRLKEEESHGQRKLVVRRRQLYREIALRLAQEYRTICVEDFNLQKLLTKPQVEQDAVEAGVTYHSQLAAVGELRMFLAERAADVLRLPAQGTTQHCHMCGAKSNASDKSQLVHTCQSCSAQYDQDRNAALWLLRGGVPEYAIDGA

SEQ ID NO: 216 - protein, 621 aa, Unknown
  Description of Unknown: terrestrial-soil sequence
MTMIRVYKYGLLRPIQNEALVRAQLRAKHDYRNTLIEIERGRRTAMRNVEEQHSELATAMAASRAALVELEESRQAIRLARSKSRSRSETNVMKERVKQARIVRRTTSQALYDCRARVRPEMISARDVINERAAELVRGARALTTSYWGSYLLAEDEVKAAAKQPLYDDSTPNDPRFERWTGEGQIGMQIQNGMTPGEVLSSEDTRLRISEPNWNDGKHVRTLRTLSLRVGSEGRKPVWASWPLIMHRPLPPAARIKRCNVSLRRHSSREIWSAELTIECPNVTSAIREEHGWGRGGGVEGAVGVDIGWRVVTDDDAGLRVCAYASEDGQDIGELRLSPHEITRLRKADEIRSIRDKRFDAIRLIVRDKLATLEVPAWLSMSTLHMHVWRSPARLVSLSKRWSKERFANDEEVFDLLESWRYWDSQHYQWECDQRTKALRRRREKYRVFGARLAEKYEVLVLEDRAEDDRTKPMDLRKFARRAQTEMEPENETARSNRHLAATSELRQALEEAFISHGGRVELAPCEDTTRTCTACGVVDRGLDAETEIDVTCSSCGAKQDQDVRASNNLCERWRKAQNAGGARNAKAAKSEGRWKKARRLRTEKQQRMGTFRNASDNSAE

SEQ ID NO: 217 - protein, 518 aa, Unknown
  Description of Unknown: terrestrial-soil sequence
MIRVYKYGLLPPTQNINLVRDQFRAAHEYRNLHVEIERGRRAAVRELFDTDEIRAASELLSRTNGAERLPIYKSLAALRSKRLKESSTRVDEIEELAAGLRRGARALTRCYWGSYLTIEAASDQVRKMPLYGRDGITPNDPRFIYWSGESQIGVQLQGGLTIPVLHEARDTRLRLERVSLEPARGRHPASRCRMLWIRIGSEGRAPIWATFPLRYHRELPSNATIKWARVSLRREGLREEWSCEITIDIPGAHPRTLDTSLTGAIAVSLEWTAAVNELLVARTLDCQTGEYDELRLPARMVTGLRKPDGIRSVRDKNLNELRPRLIAAFREPMAPWLAAMVARIPHWRSPDPFHALAMRWRREKCDDAREAYDILQTWELRDAHLWDYEAGSRREALRERRELYRVWSAKLSRRYKTVVLSDADLSVEARTTKEVQTDRQTAAVYELRQSLRNAFAGEESMGPGSNVQELCDRWNGEQTTGNIRNGEKSNTFEEVKGGAWAKRKSKKSSAKSILDATR

SEQ ID NO: 218 - protein, 596 aa, Unknown
  Description of Unknown: terrestrial-soil sequence
MSVLVYKYGLRPPIEQADRVMLEMRAAHRYRNTLVEIERGRRAAQRALLAEQPQLAPFELALTVAQAELTQAYLEIRAARQTTRRRSETEPMRVRLRETRAAVRDARGSLYLARAWLRADPALATARDRIDGVAEGLRKNARAYRGCEWGTGGLIEKADEQARQMPLYDGAEPNDPRFQRWTGEGRISVQLQGGLELAGLEADTQLRIGDGVRLPGQTKPSKHAERYRTLWMRVGSDERRKPIWAVFPLKLDRPLPTNAIVKLAVVSRRLDGPRVSWTVELTLDTTTCARRESCGHGIVGIDLGWRVFGDEIRVCAWDGDDGETSELRLHGRLLSGLSRADDLRAVRDKNFNAALAAYLAWTDRQGPLPAWMRPRGIHQWRAPGRLAGLCLRWSRSRFAGDAVGFDALDVWRRRDLHLWWYESGQRRGSLAARKDLYRRFAAWLARRHDTLVLEDFDLTRVSFKGQANAQANANRHRVATSELRLILIHAFKSRGGRVVMMNPYMSTHECPVCHAVTAFDAAAYVTYSCLGCGASWDQDESAAKILRERGSDVGDPQSARSENGPDSGGLAESRWAKAKRMKREKEAARNETGKGA

SEQ ID NO: 219 - protein, 521 aa, Unknown
  Description of Unknown: terrestrial-soil-agricultural soil sequence
MSLKVYRFGARMPLDRDLVVAQLRAAHDYRNELIQYERGRREAMRALYDTPEIRDAEALLKQATKSDRKAAKRALYTLRREVLEARRDEAQAINALHHELQLGARALTRCYWGSYLDVESAMQQARAAPLYDEDGLTPSNPRFLRWREPMQGQIGMQLQASRPLTTADAMRGADTRVRVERRDGPYATLWIRVGSEGRAPVWARVPIKMHREIPNAATWKWVRVSCEPRSLRDNPEYRETWSVEITVDDPAPRARDLDTSRDGAIALSWSWDVLANESIRVASYVDTFGRRGDIVCPASIAKGIRKPDGIRAVRDMVWNEEQKEIIHRIKRNANAPRWLVEAANTMHLWRSIARVHELARRCRIEGIAEGPAYEALHKFVERDLHLYDYEKNARDEALRERREWYRLHACWIARTYRHALVSDHDLSREARWGDESDVRFTAAPDQLRGAIKNALGDDAIVAYWDHEPEWCERACAAYLVGGARGEMFAERKEKTSNAWAARKKKKTETMTARKEAANASE

SEQ ID NO: 220 - protein, 573 aa, Unknown
  Description of Unknown: terrestrial-soil-agricultural soil sequence
MKRKKSQDESINWKYGCKSPRGEGAEILRQQMREAHNYRNKLVELELLKRQEFYDLERELFPEYADLQEQEKQQADKVEDLRKQWKKANARARTRTEQHLLKAQIAEEKQTLKDLRARMKEMKEQVRNSEELKERSKQIKKRHYQRLKDLRAETPAFWGNVGFVDQAAQSMASGSPPKYYRWEGEGFIGVSFRTPITPEVLMSGRNTRAWLEPCKTANNKAGRVKKTTLHIAVESENRKLKMASLPIYFHRDFPDGCEITSVRVFCKKVGQREEWSAVFQLRSASFAKPDAAADGMAAIHFGWRRVDDGLRVASVVDEDGTEEVLILPESIIDSYAYVKDIQAIRDYLWNETIAILSAFLKQHSDSLPEPVKEASQNMHLWKGRGRLVHLINVWSDHRFPGDEEMFLKLTRKGTPANEYHDSGWLHRDKHLWDIEANVRDNAALRRKALYREFAAKMRRKYRHLITAKLDLKKIVSVKNPEEEDDAAMKHHSRVAAIHSLQAALSDSMRDGWIVVPAAKQASTCHECGAKFQDDSGDAYISCENCGSTFDREFNACKNLLFGPKQVNAAPALV

SEQ ID NO: 221 - protein, 618 aa, Unknown
  Description of Unknown: terrestrial-soil-agricultural soil sequence
MAKRQREGTEALVYAYGLLDDQPELYSDPNVAAEVQRQRDFWDLLVRLEQEHEERVYQYLDEHAPEYRAAFEALCEKRRELDRLIERKRRERAEAKQKVEDPELDSAIKNATRDWKLAQKEMWAALKKARREHKEALAALRAEFYARIPKCKDSPLFWANYNRVRQSFDATLKRVRKQGQTVRFSDPHRDDVCLTVQIQKVRGVVGCSFEDLLSGRVSQLKIAPIDEAAWYTTRANRRRLCRTEVTMQVDRAGNTVRALVAVDRPVPPEARIKSAQLVWRRVGERYVGKLCLTISMPAVERTNGSTAACGIDVGWRRTDDGGLRVATIVDSSGNVDHLELPADWMSGMDQVKRLSQYLDDAALDIATLLLGRDDLHPAIAAAIKRWRPGLGAGHVNVAALRDAVRELGFTGLPAELCCGVRSWRDRKERCCWYHRHIHLSTWRDNLRRKLLLRRREIYRLAALTLAERYAVIGIEKLDLAKMAMTKKREDGSDPTLHSAARAQRQRACLHEFRTELEHQARKRGARLELVDASKTTITCHECGAETQPTRRDRMMIHMACDSCGAVWDQDVNAARNILLAAIGASGDMTPPDDDGGSGAYKRHSEEISDRSQLGAPLL

SEQ ID NO: 222 - protein, 672 aa, Unknown
  Description of Unknown: terrestrial-soil-bog forest soil sequence
MNILVYRYGLRAPHENRDLALSELRSSHEYRNKLIEIECARRKRVRAAEDALLGKPRLKLAEAQSALDAAIKAVSKHRAETRKRTTPAEMLATLKAAREAQHAASKAFRSARQLVQPRCSDCRKKDLPTPCEHATPEGVGLLAELDAAQDEAKESIKKFRNESGPFWGSYLLVDKAAGQSFSELALYDIDGKPNDPSFLRWTGEGTLGVQLQGGLSVEAALAGQDTQLRISSPPVACWDPSTGSRKARSRQSRESEVWLRQGSVGRAPIWCKFGLHMQRPLPPGAQIMWAEAHCRRVGPHFDWYLTLTLKVDDAVALKPRIIPTRDAVAIDVGWRVFGEGETHELRVAYWSDGSNDAPVVIREKDIRVPGFVIPPRGELRLDTATLNQLTQPEGVRSERDVLFDGVRARLIEWLKTPHENEPEWVDSDGVVVTLREHCKALHAWRSQAKMAALTSRWGEWLKEHPDGDKWAYDMLVAWRGQDRYLWAVESRWRDRARLRRRELYRLFGVALARTYGTVVLEEFDKREIAKRPKTEDDGEAHPARSNRQLAAVSELCECVAEAGTSRGRNVVEVPCENSTRECPVCGCVDERNAARKVTISCACGHVWDQDDGAADTLLGRWRKRPGDAKMAGAPRKPKILNGDGSVENRMQRAKRKGAEKALRKMELSKTTT

SEQ ID NO: 223 - protein, 561 aa, Unknown
  Description of Unknown: terrestrial-soil-bog forest soil sequence
MTTRVYQFGLRPPIEGIDLVRAQLRAAHHYRNELIAIERGRRSALRQMDDTEEVRKAAGAIGGTAKADRRKAIANLRDARRRARESKPEEFKRIAEREHEMLLSARANTSCFWGSYLDIESAHRQARSAPLYGDDALEPSDPRFIRWTGVEPPSGTYPRLPQSGEGQIGMQIQKKGKSSENGKSSENGKPSEEKRRLVTSDVFACLDTRVRLKRGGAKDGDPRYGFLSLRVGSEGRAPLWATWPIKISREIPDAAEWKWVRVSLRHEGRRERWSCEITVNDPAPAARSLDSRLRGVIAVEWEWSKLEDDSIRVARWADSMGETGMVELPGSIAKGIRKPDGIRAVRDMISHELRPRLARLIREAKGPKPPWLVAAANTLHLWKSPRRAYELAERWTDPTLLPTARVVLFEWRARDEHLWDYEAGARSEALRERREFYRLLAARWARRYQSIILSDQDLSREARWGEESDLRFTASCCELRGALRNAFGPDAFDGKYARSEQEDWQWCEQARDAWMAGGARKDAMCAKRKEQTGNAWAKRKAAAAAKRAEKGSACEPPGKSV

SEQ ID NO: 224 - protein, 628 aa, Unknown
  Description of Unknown: terrestrial-soil-corn, switchgrass and miscanthus rhizosphere sequence
MPVIVYEYGLSPPKVNAAIVEEQFRLAHKYRNMLTEIELERRTKIRAIMASHPDMVPFETELAEVQAEIEKLRGEINAIRMAARKRSSTPEQSKRIKTLAARARELRTEIKERRKRVATELAPDLKAIQDAAVQRRKDERAKSGVYWGTYLLQEAAADQARDQPMPPKFTRWNGDGRVSVQIQQGLAKEGLWGESRQVQIATRIDSLVYDHEVTRRGDRRRLYRTTLRMRVGSTDRQPVWAEWGISMHRPIPDGAVIKVVTVSRRRCNSTQWWWRVQFTLDTTDCKPRQRPEYGVVACNLGFSQTDSGAIRAGYLVGDDGFEQEILVAKSDLYRGRDLTPEQKQKAMTYVRDCLAESSEIRGARDKSLADFKTRFLEWYQIAKATTFGEDAVPEWFRDRMEHFHLWRSPARVREMMLHWASNRWAELDDPESRWPDSRGLEMMSTWVDEDTKAEVKESSLRNKALGDRREAYRIVAATLAKRYKTLLIDDTNLKHLQDGPEPEDAEGDIPAVKYQQRLAAGSELRQVLINAFGGTNVVKMKPSNMTVTCSGCGARDVSWDRADGFRKHRCSACREIWDQDANFCRNLLKEYASGGEAPAAKIAKPSRSQRFHESRKKKAAAADQQEQG

SEQ ID NO: 225 - protein, 690 aa, Unknown
  Description of Unknown: terrestrial-soil-corn, switchgrass and miscanthus rhizosphere sequence
MPKKPNPNKRVSSDTRGARIWSYGVLFPREREVNDAIRSLLHQANRYQNCQVVIERVRRQRYRVIRSAASPELARLEQEYKDLGLAIDAEVDTMRAQRASVRRRTTDPVIAAKIKALKAKRAAVNIELKIAREKANAILRPIQDAYNRHRKPGGVKAAPRTAEKLNAAARQTTLEEDWPELAKQLLRLEDWATRRVKQAREASGLPPGTYLLVDQAIAATKKEPTDPRPKRFDGTGRIGVQLFDFTPQTLFSRERKQLQIDPLPATQWDTRPGRRKARTELRIDFGGNAFEMKAAFKMILHRPLPQDASIKWAWIHVTRIGSRLHYSLQLTMRSDTFQLKPGGQGVVAVNLGWRIKEDGAMRVAYVMDEFGTERELAMPPELRGGFVLAENLRSYSDQHFNVAKKAIGEFVKTDAAPAWLKEQCTSMHAWQRHGRLLRIARMLAIAEFPDTVLPSGERVRNGMLSELWKRWKEHRLAAVPKLDLFDTYQVITDWARARGATDLKAATLYLWVWKKKNDHLYNWECGLRAHKQKCRKQLYRAWATELATTYSTILVEKFDLRDTREKSAPEAEQEENPTSLIRSQNFAAPSELRDAIVAAAGTGRVKEQKSHNNTVTCHECGHTSDRDRRFEALIQVCESCGVVKDQDKNNCENQLSRYFSGESPGGGLDPESARNHENSSDLKTDRDAAE

SEQ ID NO: 226 - protein, 630 aa, Unknown
  Description of Unknown: terrestrial-soil-fen sequence
MKRKTSPIPTKVYKYGLLAPVENVKLVDHAFYLGGKFYNKLIEIERTSRNEYRQERARRFPNHDKVEKLVATLSDQKKKLSEIIKASKIATKSRNVPPELATEYKTLAAAYKSAKLRQDAEREQCKKDRDFSAWTLTHNEKKNALVADARKNSGLMWGTYNAIAASVQQAGASAILDPEFKSYRGEGRIVVQIQGGIYLAELGSDTQLQINLPNLNESLTRGEWRQSSRTIVKMRIGSDKHKKPIWATFPAVFHRPLPSDARIMSATITRRRLGVFQSSGRYEYHLCISCESTMFDNEAVRPRLQDPTQQREVREHRGTSTINFGWRQFDQGKDKRLRIAMTNNEVTGLEPLWLPREIILGLQKCENLRSIIDMKFNEVRALLTTWLTPHKQDCPAWLAESLQFLHTWKQPDKLDRVVANWGSGMRFPADADIYPVLAEWRTKHRHLSEWMMRQRRKSYNHRDDYYLKTAARLAQSSSRMVIENFTISKVAVKPGPEVEKTGGNEARHNRTLAAVSELRSALIHACSKHHCPMDITPAVNNTRRCNVCGKLLDWDPAIKVDRQCPECSNWDQDVNATDNTNDKVASGDVVTMVVPAKTSENGEFEAGTISTFGSARKRLHNLEKTLTIQE

SEQ ID NO: 227 - protein, 674 aa, Unknown
  Description of Unknown: terrestrial-soil-forest soil sequence
MPVTALPDGTISTARYAARGPVPAPVTEELRLGNWLDNLLTEYELDYEAAKAAAWEEDPHVALLLAAVTAAEQAWQAARDESAACKQKLGYAKRTGTPARIAAAKAAAAQAQQAYRAAVKARQEAAAALRDIKGLRWHVAKAAINAAAEERDRKIAATYGPYRDRGGYWANWAEHAKHHKTAAKRVRDMRKQGQPAQLRYHRFDGTGTVVVQIQRELGVTPEIRAQVTALKAAGRTPGQIKAETGVRAMTAAKMKPEGAVKEGDPPCTAAALADETGKWRSSVRLTPELPAGFEELPRGERRRIASQGMFAIRTGSAANLAVSVVPVTVHRRMRGDGDVKYAKLTVTRNGPDKDMSVSLTQRVPAPQPRAGGRLVCVHAGWRALPDGSLRVAVISGAGPLTPGLAAPGGRDARAGELTGVVRDLGDGCHEVVIPARWRDQDAATAKTRSVRDLARDTAIAAAADWLAASPRYETTDGEPLPAAHEVRRWQSPGRLAVLGQRAARGDYGDDAAGLGELIAGWAVPDLEAWRREARGRRHLTRRRDDAWANVAAWLCTGTREVRVDEWDIRAVTRRPGPGETDDPQAAAARANRTLAAPGALRQRLTITAVLAGVTVTVLDPPDAGSVLQVHAGCGGVLDRDARRESIVVQCPGCGARVDQDVNMVRLMAARQPSA

SEQ ID NO: 228 - protein, 600 aa, Unknown
  Description of Unknown: terrestrial-soil-groundwater sand sequence
MEDAMEADQTPATAEPAAGAVIVYRCGLRAPLDWGRDCDDQLYLMTRLWNTLVEIEHAHREAYFAATASDPVVAAIEAEITGLERLLEQLYAQRAELRKAARKRVRTPELDERIAELKAKLKARRAEAKEARKAARETIKPQLETLEAERREAVKVARNASGLWWGNYNAVCADYDRARSAVIKRGGKLQFRRHDGSGRLVNQIQGGMSVADLLGRAHSQVQVTGGAWAVNARGHLTATVYTRTAAAARAAGAGGTRRTVTWPLQLRRPRPGPYAQARIKEVVITRRRRGHKFDWHVSFLCQLPATEPALPAGRACGIDVGWRRLNDGVRVGTIVYSSGEREFVVLPERLVAAARRAQDIASRRDKIFNDLIVSWRAIDWTNAPEELAATAVRLQKSKLSPPQLHGLVYAWRRHPFFAPDAFTVADRWLAEDKKLWETEASLARHVSNARRDLYRGAAKRLVATCGLIGIEDIDLAALARRKTPAGGDNEIAQATAWWRRIAAPGELLAAISHAARRDGALIHKHSGKSTWICAQCGTESMPSDRSQLVHTCPHCSHTWDQDVNAARNLLAAALASAPVTLDGPAALAWEKPRDPNDLEE

SEQ ID NO: 229 - protein, 604 aa, Unknown
  Description of Unknown: terrestrial-soil-groundwater sand sequence
MEDRMEDAMEADQTPATAEPAAGAVIVYRCGLRAPLDWGRDCDDQLYLMTRLWNTLVEIEHAHREAYFAATASDPVVAAIEAEITGLERLLEQLYAQRAELRKAARKRVRTPELDERIAELKAKLKARRAEAKEARKAARETIKPQLETLEAERREAVKVARNASGLWWGNYNAVCADYDRARSAVIKRGGKLQFRRHDGSGRLVNQIQGGMSVADLLGRAHSQVQVTGGAWAVNARGHLTATVYTRTAAAARAAGAGGTRRTVTWPLQLRRPRPGPYAQARIKEVVITRRRRGHKFDWHVSFLCQLPATEPALPAGRACGIDVGWRRLNDGVRVGTIVYSSGEREFVVLPERLVAAARRAQDIASRRDKIFNDLIVSWRAIDWTNAPEELAATAVRLQKSKLSPPQLHGLVYAWRRHPFFAPDAFTVADRWLAEDKKLWETEASLARHVSNARRDLYRGAAKRLVATCGLIGIEDIDLAALARRKTPAGGDNEIAQATAWWRRIAAPGELLAAISHAARRDGALIHKHSGKSTWICAQCGTESMPSDRSQLVHTCPHCSHTWDQDVNAARNLLAAALASAPVTLDGPAALAWEKPRDPNDLEE

SEQ ID NO: 230 - protein, 525 aa, Unknown
  Description of Unknown: terrestrial-soil-palsa sequence
MIRVYQFALRTPVDNEPLARAQLLAAHRYRNQHVAIERGRRWAVRLCEASEEVDEAVALVQSATKSTRKDALKDLRAARKAARETHADELARIAELDAEIRRNARSHTSSYWGSYLTIEQSSDQVRRMPIYEPDGLTPSDPRFVRWTGAGQIGVQLQGGALTPDVLAGRDTRIRLIDGVLWLRVGSEGRDPIWAKWPIVQHREIPSGADWKWARVSLRKEGPWERWSCEITLEIPGEHPRNLDKDPQGAIAVEVTWDKPGDALVVARWRDDAGRTGTIELSEYDEQGIRKPDGIRSVRDQLLNDLKKRLPRAYAECRGDLGPPWLGEAIDGAQYWRSQSRAHTLLTRWRAEKCDAARAAYEILDAWWLRDMHLWEYEAGARGQALRRRREKYRVLAVTWSREYRHVILDDRVLSREARFGDASDLRFTAGPSELRQCLEHAFGGRNGGNVTTHPVRDDAAKSETEERDWCERAIDAWIAGGARATKKVSESTGVKGGAWSLRKSKKSQKQAENGTAREPVAKGAV

SEQ ID NO: 231 - protein, 643 aa, Unknown
  Description of Unknown: terrestrial-soil-palsa sequence
MSKFRVYQYGLKAPTENAELVREQMFLAHRYHNTLIEIERGRRGAIRTLTRGHNATIRQLEADLLEADALVGKIVREIKTQHSETRSRLSTQTDKEELKVARQKKKEIKSQLIEARYLDKNNPSIINERTNINDLAKEAIKSARKHCGVYWGTSQLIDDAVEASRKMPLYNGEKDNDPSFKPWKHQGSVGVQIQKRDDIQGMDVKNVFGADTCFRIDCVNEGAFYAEKRGDRRKQRKTTMRMRINSDDKGKPIWSYFPMTMHRPLPDGGIIKKAKVRLKKIGSREEWSLSITVDMSNVLMTTNNNHEAVAIDIGWRDMKDDNGQTTGFRMCKSRGTDGKIEEIKLDPKIISAIKKANELRGLRDDNFNKERASFVAWAKVNVLPDWLVKETKTIAQWRSISRLVKLFKQWKNNRFDGDEVIFGVSGKWNKGDKSVITGTGLAGWAYHDFHLWNWEANQRTKAIRRRKEFYRVEASKLAKQYQTLVLEDFDLSDVSQTAEPEAEDDNQRGRSNKTISSPSEFKLALINAFDARNGKIEKVNPKGTSYICHLCKSKEHLDSTFHIHTCSKCHQTWDREDNATANILTLWRERLSDEQNAVSARKDENGNENKGVEETRYQRRNRAKQEKKARLETARNAEANIAE

SEQ ID NO: 232 - protein, 640 aa, Unknown
  Description of Unknown: terrestrial-soil-palsa sequence
MIKTEKYGLLSPTLNADLVLLEMRKAHDYQNNLIEIERWRRDEIRKIESIYGNIPQLTIDYDIASNDYETILKTKKKNNSNARANVSTPELNQQLKDAKSKRKACENKLKQARLSSRKDDKIKKAKDNISILENKKQSLLRKSDAAPWYGTYMLIDHAFGIPSAKGKTKGMPLYNGINPNNPIFRNYNGEGRIGIKQFQPYEPINKIININPTSKFLQIVPIPPPKLKKDGSQRKIGNKNLKLLRIRIGTGEKNAPIWAEFPMVYHRPLPSNSVINMVQITKKIIASREKWAVSISYEDNIQFSKNEIKKVVAFDLGWREFPDRIRIACWKDNDGKSGEISLPIGLGIKKDSNDKIIKNKDGNDKLFHSTINKLRKVKELKSGRDLDFDRVKQLFGYFVNSGIIFPQWFQDWLNTTNKNGKKINDITYISKWRSQTKLSKLILQWKNNRFTGDEDIYMWLEYWRYHDFHLRDYEYNLRNKSIGAIESLYKNTAAHYANNYDAAIFEDINLSNIAKGKVGSTNRQLTAPSKFRNACKNAFNMRGKCYEEIIARNTSRECAVCHVLNDIGGKLEYFCSGCNVELDRDENAAENILERGRKKLSDNNTYIDSHENCEHDSNAKNAVGARIDENCNENNNLQYA

SEQ ID NO: 233 - protein, 552 aa, Unknown
  Description of Unknown: terrestrial-soil-peatlands soil sequence
MTRRVYQFPLRAPIEGAALVRAQLRAAHEYRNDLVSIERGRRSALRAVDDVPAVREAIAVVLAATKSTRRSAIALLRDARKEARAKAADELVRIGVLDAQARRDARAITPTWWGTYLDIEAAHNQARSAPLYEPDAVTPSDPAFARGPRLGREAFAPDDARAAWWLGDGQIGVQLQKGLPTPGALAGADTRVRLVLRPADHPRDRYGTLWLRVGSEGRDPVWAQWPIKLHRAIPDSAIWKWVRVSVAREGTRERWSVEITVDDAAPRPRDLDRSLAGAIAVEWEWSLLDSGAIRVARWADTRGGSGELLLPERIATGIRKPDGIRAVRDLELNALKDSLQQALREASDVATPRPPWLADAASTLHLWRSPDRFRGLLYRWQRERYDGARSAYEMLEAACHRDDHLYDYEVGARRGALGARRDLYRCVAARWSQSYRTVLMSDQDLSREARWGPESEVRFTAGCFELRSCLRNAFGDADAIDSRWRDAPGEQEDREWCERTRDAWSAGGARGDGRFAIRKEKTTNAWAARKAKSKAKRGGDEASRDPDGKGAE

SEQ ID NO: 234 - protein, 622 aa, Unknown
  Description of Unknown: terrestrial-soil-pond soil sequence
MAGRKKKDAPPSRVWIFGCGEPVDGAELVRDQLFETHRYRNDLARHVLNSRQVYREARSEICRVAALEQEHLEAKEALDVLRQEQKAWSAAARRRVQSPELQQAIKDAKQKKRDVLERLKQAREEVEQDPELQQARAEINKRAAAEKKRLYNESPAVWGSRLRVDESWLQMRWGRMDPKFRRFDGSGRVVVQIQKGMSVAQAFECKDTRFQLARPTRDWDRRTGRRGGTRTMFRIRVGSEGKRRTPVWATFPVTLHRELPEDAQIKWVEVRAVRQGPDLRFQLHLTLEWHGFDPRSRGAGAVSIVCGWRAMHDGTVCVGRWIDDSGRSDVLVLPADVGEAEKHASSLRSISDLHFDAARRVFKSRRHLLPAWVTEESAYLDKWRSHARLAKIVGRLTAEILGDEAAHVWRQWRRYRQREGLDLHAPYEELSTWLSEQGEVDPARQTAFYLEWWRRKNRHLHRVECNVRTKALRRRKAIYRNWAASFARRYETVLVDDFDLRQFARNAAPEEDARQDYLHGVMRLAAPGELRLAFLHSLGGARAVKVPATEGLRRCYLCGSPMRRPDRSGTVEHDCGVITPWQTIRGLDMLRGAGVDTVAAEQKLLEGHEAMKKLFRELARKG

SEQ ID NO: 235 - protein, 701 aa, Unknown
  Description of Unknown: terrestrial-soil-rice paddy soil sequence
MSETDTMAFKFRILRIVSDEARIKREIREAHQLYNDLVAIERKRRDDTRLFWADRGGYADKLAGLRAAAEDAEKAAALTAKGDAGKKERQEIWAPVDTLKREIWELQRKTEEELSDPAKVRRKQRARELQAEAKARAGKALKKEALAALLDAEPDCMSPRDRRRLELVREYEARGVAVSGKAVAQRLRDEGLVGPTEQIEEAARKAGYEAYLKRGVSPGTRAIIADAFERSLEDLEPWATQRFSRWDGHGSFGVQVQGGSLTEEVYSGEHTQVRLRRLEDTGKHREGSRRSGRRHELRVRIGSDGRAPVWAVFEAIVDRPLPPEASIKRVVVTCDRLGVLDIYHVVFTCSVPSSVYHKRSGEQRGTVAVDFGWRSLGGEEMRVGYWVNDRGESGEIRLPGVGVARRGTTGKNSPYEPKIRGQVPIRQLDKHTRDLTEIMAREFAEYDGGKICGGALRDVASWLSANVSIVPEWLTERTTGIHVWRSQHRLYWLAQDWKAQRFDGDAEIFERLSAWASDWAHLAEWERRQHAAILAARNEHYRLVAVGLAKKYERIVINGADFAAAKRRKTKDETDRLVMIDDRSRSQAHLAAAGELREEIVRSAKKWQAIVMKAKPNKATCHACGSTCVYDAAKDLAHECEHCGVRWDQDENCCRNMLCEWSGDGQTAGGARVSPNAKKSGEVLRSKKRDEDGGPIGEAAE

SEQ ID NO: 236 - protein, 739 aa, Unknown
  Description of Unknown: terrestrial-soil-surface soil sequence
MSTGTVPPAAGNTPPTGEVTVARRYGAKPGPIPAAIREELDRAHWLVNRLVEIDRECDEQVTAVWEADPQVGPVLAAVRDAEDARAAASEELRRAKVKLGAVKSGRSRTGLDVARARVDAAREAVRQASAALKQARDRAGAVKQERWPAAAPVIRAAQEARDAAIRATYPEFVARGGYWATWNDITGAHKRRRDRVQQLRRQRRPAQMRYKRRDGTGTLTVQLQRQLGVSAAERAHVTGLRDAGLAPSQIAALITAGVPAAEVTPARVARLRAAGLSAPEVTQALVAGADPAAAAAASRTPGKAARRAALGEVLAAAAAARPPRTPGRRWRPQSVARVRAGGKDTPGDPPFTPDVLAGPAGPAALQVRPVLPPGYPQLPRRQQRALARQGEVVFRTGSAANAAYTTIPVVLHRPLPAGGDVKMGRLTVTRCGPDLEQSVSITARVPAPPPAAGHTAAVHIGWRALGDGAIRVAVITGPRTPPPRQLAEAGVVRPVGGCWEVVVPPRWQVALTRVDGMRSARDREWQQVRDRVAAAIPPGHDTLPPPAQVRAWRSPGRMVTLAAACEAGEHGGHGRAIADLVTPWARRDRAAWRNESRARRRILRRRDDAWAVIAAWLTAGAGTVIVDDWELPPLGRRPGLTEEDDPQWRAARANRVLAAPGALRARVRVTAELAGVAVAEFPVPRPGQAHAGCGHPLDPDARREDVLVPCLGCGVKVDQDINMLTLMLDGAREGAPQAG

SEQ ID NO: 237 - protein, 615 aa, Unknown
  Description of Unknown: terrestrial-soil-surface soil sequence
MTAYSYGCPAWAVPLAPRETDPVTVIAALAGTAQALRQAQAALPGGGEREWKRWAQALQARDQAREAVWVTGEEALAGQLRLACRLWNRLVEVTRGHERARAAVWASDPAVAAAQETLDAARAAVAACHERIRVSRQADRTTVPRDADKQALDEARAAARAAREARDAAREAAFPRLRARFAAAAQARLAGVKAAAAEATEAGLGWAACNDITWRRFPAALQKVDRERAAGRPAELRFRRWDGTGTVTVQVMGGAGIPPRTLPALNSGRHPRSAVMRLQPWRDPSAGRPKGADRHGTLTLTAGRSRRHGPLRLQIPVVLDRYLPADADIAEVKVTRFREGTRHRLRVSAACYVPAPPGPPPGGATVAVRLSWRAAGGGWVTAAQVGSSSPLPPLPRSLEHAVRGTAGGPRLPLVRVAPGSLSAEVLYYAGWRRLLERGEAIQAVRGQNTDILREKVTAALRDDPALAAAVKVTAGEVARWRAPRRFAALARRWPAGHPLRPLLEEWRRRDRHLQDYQACETAQVLAARRDAWRCTAAWLCAGASAVVIDGTRLDAEKQAPGDDEEDPEGARGARRLLHRSAPGELRAAVEAAAARRGIPVTILKAAVEPAAGGGA

SEQ ID NO: 238 - protein, 628 aa, Unknown
  Description of Unknown: terrestrial-soil-surface soil sequence
MTAPGGEGTPARVMTAYSYGCPAWAVPLAPRETDPVTVIAALAGTAQALRQAQAALPGGGEREWKRWAQALQARDQAREAVWVTGEEALAGQLRLACRLWNRLVEVTRGHERARAAVWASDPAVAAAQETLDAARAAVAACHERIRVSRQADRTTVPRDADKQALDEARAAARAAREARDAAREAAFPRLRARFAAAAQARLAGVKAAAAEATEAGLGWAACNDITWRRFPAALQKVDRERAAGRPAELRFRRWDGTGTVTVQVMGGAGIPPRTLPALNSGRHPRSAVMRLQPWRDPSAGRPKGADRHGTLTLTAGRSRRHGPLRLQIPVVLDRYLPADADIAEVKVTRFREGTRHRLRVSAACYVPAPPGPPPGGATVAVRLSWRAAGGGWVTAAQVGSSSPLPPLPRSLEHAVRGTAGGPRLPLVRVAPGSLSAEVLYYAGWRRLLERGEAIQAVRGQNTDILREKVTAALRDDPALAAAVKVTAGEVARWRAPRRFAALARRWPAGHPLRPLLEEWRRRDRHLQDYQACETAQVLAARRDAWRCTAAWLCAGASAVVIDGTRLDAEKQAPGDDEEDPEGARGARRLLHRSAPGELRAAVEAAAARRGIPVTILKAAVEPAAGGGA

SEQ ID NO: 239 - protein, 607 aa, Unknown
  Description of Unknown: terrestrial-soil-surface soil sequence
MEKRESTVVTIAPVRMCGTTIRVYRYGLAPPLDWDDECDAEMARLDRFYNALVEIEEAAQAEYRRLSSSDETALLETRIAAAEEAKDWGAAKALRAALKEIRAALRKANAAAIDAAEEKRKADAKAARQNCGAYWSSYNAVIRSVELARQKAIKEGAAFGKRTHEPGKGDWRMTVQIQGGASVADVLGGKNSQLRIAAPAHFGALRDRPAGMSRKACRHGRVTMVVHNTGGLRRVTWPLMMHRPIPPEAIIVGAEIVKRRRLGSRWDDWHLCVTVREPAPAPHESPDCAGVNIGWRRLSVERGLVIDGAGLRIATIWDGATLNHVILPEEIISAAWRCDELTSAIDKRVDAATARIFKDSPDHPVARQLGDTFVESGRLRVRDLWTFANAMTPAPDWLLAMLRACSRDRRERAGLLRRMARRRRDIYRVAAKTIAENYGRIAICAVDWAKLARLRESGKDNPLPPPARGYRKIAAPGEFEAELRRAIKARGGTIMDIKDSVSFLCHACGKEHAPSERSAAHHTCPSCGATWDQDRNAAMNLFAALDSSGPAAIKPADSLENGKGEMQSTAYVGRFQRRAKQAQEAKLANKEALENASELVDETIGCK

SEQ ID NO: 240 - protein, 520 aa, Unknown
  Description of Unknown: terrestrial-soil-surface soil sequence
MIRVYKYGLLPPTQNINLVRDQFRAAHEYRNLHVEIERGRRAAVRELFDTEEIRIASELLSRSSGTERLPIYKSLAALRSKRLKESSVRVDEIEELAAGLRRGARALTRCYWGSYLTIEAASDQVRKMPLYGRDGITPNDPRFIYWSGESQIGVQLQGGLTIPVLHGARDTRLRLERVSLEPARGRHPASRCRMLWIRIGSEGRSPIWATFPLRYHRELPTNATIKWARVSLRREGLREEWSCEITIDIPGAHPRTLDTSLTGAIAVSLEWTAAVNELLVARTLDCQTGEYDELRLPARMVTGLRKPDGIRSVRDKNLNELRPRLIAAFKEPMAPWLAAMVARISHWRSPDPFHALAMRWRREKCDDAREAYDVLQTWELRDAHLWDYEAGSRREALRERRELYRVWSAKLSRRYKTVVLSDADLSVEARTTKEVQTDRQTAAVYELRQSLRNAFAGEESMGPGSNVQELCDRWNGEQTAGNIRNGEKSNTFEEAKGGAWAKRKAKKSSAKSILDATRQG

SEQ ID NO: 241 - protein, 670 aa, Unknown
  Description of Unknown: terrestrial-soil-terrestrial soil sequence
MAFGNVAKPSRIYTHKSRPPHEGAQLASDQLYRAHQYANALIETERQRWNATQDLMRSMFPRIAELEARIDAINAAIEAKNAAVKHQNQAARSRTATAEDRAEVKQLQSERRDAAKELTAERHRQTGVPKPRKEAWERIHAVINATTRDEKERKALRKAAQAAIDAGESPAPLTAEEDREAFGDPEYRRRRAAIDETANADRRAKRAVCEVYWGTYLCVEGAVDKSVEDCAKGQPVRNGKPPVPPGPPRFRRWSPEGKLGVQLQGGLSWLDALAGTDSRLRIELQPLAARPTVSKSGKPLPLADPNSRRSRENSQVVVWARIGTEEDGRSPIWMKTVAHLHRHPPADAVIKWVYLQRNLKGVQTWWEAQFVFEREEGWAKDRETLRGEAAIDLGWRKVADGLRVAVLIDDDGERMECVLPDSWLESWAKAQSIQGFRDTEFDAIRPALVHWLKARREAGTLPEWLGEATGSLHQWKSCERLGKVVWQWKDQRFDGDEAMFERLVEWRNRDRHLHNYARGMEETAVRRRDEHYHRWAALVRRRYALVKVEDTNWREMQHRPEATDDGKNATIGAFRCAAVGRLLETIQEHVWNVVAVEPAWTTKTCHACGHVDDFDSAKELVHTCSACGEIWDQDDNAARGLLKGRVLKWLTREGRKLPKAERVRDVEAAV

SEQ ID NO: 242 - protein, 675 aa, Unknown
  Description of Unknown: terrestrial-soil-terrestrial soil sequence
MFGHESKPSRIWSFKARPPHEGGGLVTEQLRLAHRYRNALVALARRKHEDTEAALLRYRPRLGTLFGLASSLSEAFSAAEDSVKARSVAGRRRDVLRGDERKAHAELRRAKEGAWAAYRRERSAAFRVPAVRSELDAIDAAFYSGWRAARGVAVNEWGLYWGTYLPAEAAFNQSLKPPGAGKDDASVSAKENIRKRWGPPEFRRRLRGEEFVGHEGAVTVQLQGGLDWYAAKLGNDTKLRILPVPAGLTPTTVTRPAFTRAERDRIKRLRREASLVRKELGRLGTPADPGGGDIDGRRSKLVAWGHSVRGEIARIRAGATLRTTPLPPPDPGSKRSRAGRRAEVWVRVGSRGPAGREPAWARAVAYIDREPPPGTVIKWVHLRRTLAGRSARWSVQFVLSRDSWDAETAAAGAAGVDVNWWMTPVGLRVATAAGSDGSVSHLFVPNDVVDAWRKHESLQSIRSVNADAARAHLLAFRSSGVRLPGWFREASAYAHAWKGGAKLAELVWAWKGRRFPGDAVVYARLEAWRKQDRHLHDWHGAQHDKVRRIRNDLYRKWARGLARRFRLGALKDTNYAAVRRAAPAGEEDKGFTRLYSGIASPGLLSRYLREAFAECAELPANNVTRECHGCGMVNAFDQARVRFHACQGCGASWDVDENAARNLLRRAAGARREAI

SEQ ID NO: 243 - protein, 674 aa, Unknown
  Description of Unknown: terrestrial-soil-terrestrial soil sequence
MPTKVYTYGAKLPIHGLELLDDSIIHGHRYYNALIALNRARAEKIDALRHQLIPGLDDAEAAVVAAESGLEDLRAAVRQRNAERRTKTATPEDRQAIKAAVASLKEAKAIRKEIRSRCRDCVEYKESLDKVWNDFSEASKAAYNESPCWWGTKLHISQSVERAVESSAKIGGVPRFRRWEQVRFDPAAGDDGAFVGAGDGVAAVQLQGGMTVEELLAGADWRLRMEFVADGKRTSLRAARKVIFSLRLGSDGREPRWVRIPAYYHRGGELPVDAKIMWAMIVRRALAPRRQRDGSWRPWYEYSVQLTVRTGEARPTADGGICGVNLGWRTKPDGSLRVAVAVGGNQETHECVLPAHMLAGWKLGETLQGHRSVNFDRIRAVLADWLRGSTEPPLGLEVSAVELDRLATLANVAEDADRFRRGARTLRAWAANWTRPADLPAWLTTESQYVGLWKSHARLAQLLDRWRSQRFNGDEAAFSALMVWREREAHLQQWETALRKRLDGQRKDIYRKFAARLARRYQVVATEDTDYRALKLRKPAEDNADDAAVKEHMRHGAPGLMRQYLRGRAAVELRIKSKDISRIHIDCGGINSEDRRPSILIVCPHCKVEYDQDVNAARNVLARAEVVNETPGAAREAQPKETGDDTLNDGGKRGRWSKRKADRSRKQVESAAQQ

SEQ ID NO: 244 - protein, 631 aa, Unknown
  Description of Unknown: terrestrial-soil-terrestrial soil sequence
MPIRVFEYGLKAPICNGPLVEQQMRSAHTYRNLLTQMERERRQEVRTIMAAHPDMAPLEARLAEIVTQRDEVRKAITTSRGITRSRSESPELRALARELGKQIREIRAEIKANRQAVAAAVKTDLDRIEIASVRRIKEARAACGVYWGTYLLQEADADRARQEAFPPQFRPWRGEGRVSVQLQKGLSIEELHGDDTQLHIDPVPPAAHDIGTRRGDRRRARRTMLRMRVQSDGRQPVWAVWPMRYHRPLPPGSVIKVATVSRRRHDCRSWDWMLHITVEIPDAAMKPSPASGVVALNLGFCLRPGGTIRAGYIVGSDGVEQEILVPRSVIDAISKCDSIRSIRDKNMDAMKAQMGQWLATVRATHEKIVQEIAARPPPADVDSAWYRFCAYWSMNGPAWPAWFAEATATLHAWRSADRFRRLAFRWRDNRFVGDATGFRILEGYSDQRFHDERDAWRYRDEHLERYESGMRRRALLRRRESYRIAAARLSATYRTLLIDDTDLRDFQRSPAPESESIEITRIKRNRGLAAGSELRLTMVNAFNGLSGRVVKISPATKPCHACGVVNTWDRTEDREHTCTACHQRWDQDANACRNMLLAHERDQATDADAPSKKRLSRSERLRKNRDAPKAA

SEQ ID NO: 245 - protein, 564 aa, Unknown
  Description of Unknown: terrestrial-soil-terrestrial soil sequence
MQRKTTTAPTRVYSYGCSFRGVTKNADLVEEQYRRAHAYQQKLVELELQRRAAVRAVLATDAGVVKLAEVVAQHEKALTDDLVAAAAIKQATRSKKLPPELRDRLAQTKQDLRAARDAWKAARRLFATDPNTKAALDKTNTDHVVAVKAARAASGLAWGTYLILERAADQQRNEKMDPKHRGYTGEGRLAVQFQGGTTVAGVFGGEDTRMRIEPKPGGSRKRHICKLRIGSDGRAPIWAEIEVFIHRQLPADSRITWARLKRTRRGRDYLYDLQITLESQTFAGVLQDMAHRRVAVDLGWRVTDKGAGGLRVAYWRDSDGRHEELRLPAKLLSSLDYPDQLLGIETNWFERAKAKLLAWRADVVLPEEHRSYTGTLAHWQSPLTLASYVWWWREHRFAGDELIFATMDEWRVRRFWHYRDWRMFQRDKALAARKDFYCVFASKLVVDCKELVLEDFDLSAFATKDTGPSAFRYWRRTGAPSELRLCLIAAAKKVGAKITLVDPAMTTRRCQACGSEEPWDQKTETVHTCKTCGTTWDQDDNATINMLASGSMVSGTSESLDPAE

SEQ ID NO: 246 - protein, 586 aa, Unknown
  Description of Unknown: terrestrial-soil-tropical forest soil sequence
MPITRIYRYGLLEPFLGAELVAEQMSLAHRYQNSLIELERGRRERVRAIMLGAPSLEEAQAIVDRAVKDLLDARQKIKDVRKAAQRRAETEADRASVSEIVVRLREARRVLKETRAAVRADSAIALSIAGVNDEIAEEQKRRRAACGVYWGSYLLVEQAMDAARKAIVDPRFRRWDGSGRIAVQLQGGLSWADACAGDTRLRVDLAPRAVGKGKPRPTVSLRVGSNGRDPVWASWPIILHRPVPEDATIMWAAVHRTILGGKARWHLLLTLRLPDDFVVEKGGKGTVAVDLGWRQRENGLRVGYMRDDAGDAGEILLEPAIVDGFKKVDDLRSIRDKRIDVMRPRLAEWLRERELPDWLAAERATMHLWKSAARFSRLAEIWRGKRWDGDVEGFDLLWAWRAKDRHLWLWEANLRDKVLARRLDRYRVLGAELARKYHTLVLEDFDLRNLQRHAKPESETVEIGPVRGRQRIAAPSLLRQKLVDAFVARGGRVVEVPSANTTRSCHACGLVEAWDPVTNLMHACTGCGALWDQDDNACRNLLLRERLGADEASEAARPTETEPKTSKWGRLGRHKKRPLASGNANE

SEQ ID NO: 247 - protein, 644 aa, Unknown
  Description of Unknown: terrestrial-soil-tropical forest soil sequence
MLVGWFRYNEARPAGGDVATCNNATMKRSEFNGRVLVYRFRCPVAASNIPEAAETQFRLAHELRNELVAVERAHADAVAAIWADHPDVAATLQAQAVAEAAVAELVERAGKERIADRAKEPRAQTRAEIKAARATLAAARQDTKAARSAAYPLVRPAMADAQTRRRQAIGDAGRGAKTRGLFWHTHDAVLAGHDTAVKRVAALRAEGKPAELRSRRWDGEGRIRVTLMRHEWSHGCGAQPCGQPSPECPRRQPGDPLRTPALLAGGQGPWRNVCRLPAHMDPAICAEHPPRRHGERETILLRVGSEEREPIWWELPVFVHRPLPPGADVAFVEVRRERLAGQTRLSVCVTVRLPPVATLTEGAVAAIHPGWRSVTGGIRVMVIAASRPLGPIPERFAPVVRPLTGNHVEIIAPEEWVRVLGHADSVRSIRDQALDVIRRKIVDALAEDVPGVEVSAADVARWRSPGRFAALVRQWPNDHPLADVLWAWRRQDRHLWKGEAHERDQIAARRTDTWRHVAVWLCDQVAVIGHAPTPIAELSRVPVIEDGDDRQATLARAHRALAAPAELVSLIEIAAGQRGVRIVEIDGARLTATHHVCGEVTGDLARDSVMLWCSRCGIAFDQDANAATASLARTIGDLSSAKVQ

SEQ ID NO: 248 - protein, 619 aa, Unknown
  Description of Unknown: terrestrial-soil-tropical forest soil sequence
MKRSEFNGRVLVYRFRCPVAASNIPEAAETQFRLAHELRNELVAVERAHADAVAAIWADHPDVAATLQAQAVAEAAVAELVERAGKERIADRAKEPRAQTRAEIKAARATLAAARQDTKAARSAAYPLVRPAMADAQTRRRQAIGDAGRGAKTRGLFWHTHDAVLAGHDTAVKRVAALRAEGKPAELRSRRWDGEGRIRVTLMRHEWSHGCGAQPCGQPSPECPRRQPGDPLRTPALLAGGQGPWRNVCRLPAHMDPAICAEHPPRRHGERETILLRVGSEEREPIWWELPVFVHRPLPPGADVAFVEVRRERLAGQTRLSVCVTVRLPPVATLTEGAVAAIHPGWRSVTGGIRVMVIAASRPLGPIPERFAPVVRPLTGNHVEIIAPEEWVRVLGHADSVRSIRDQALDVIRRKIVDALAEDVPGVEVSAADVARWRSPGRFAALVRQWPNDHPLADVLWAWRRQDRHLWKGEAHERDQIAARRTDTWRHVAVWLCDQVAVIGHAPTPIAELSRVPVIEDGDDRQATLARAHRALAAPAELVSLIEIAAGQRGVRIVEIDGARLTATHHVCGEVTGDLARDSVMLWCSRCGIAFDQDANAATASLARTIGDLSSAKVQ

SEQ ID NO: 249 - protein, 651 aa, Unknown
  Description of Unknown: terrestrial-soil-tropical forest soil sequence
MDNAAYRVLVGWFRYNEARPAGGDVATCNNATMKRSEFNGRVLVYRFRCPVAASNIPEAAETQFRLAHELRNELVAVERAHADAVAAIWADHPDVAATLQAQAVAEAAVAELVERAGKERIADRAKEPRAQTRAEIKAARATLAAARQDTKAARSAAYPLVRPAMADAQTRRRQAIGDAGRGAKTRGLFWHTHDAVLAGHDTAVKRVAALRAEGKPAELRSRRWDGEGRIRVTLMRHEWSHGCGAQPCGQPSPECPRRQPGDPLRTPALLAGGQGPWRNVCRLPAHMDPAICAEHPPRRHGERETILLRVGSEEREPIWWELPVFVHRPLPPGADVAFVEVRRERLAGQTRLSVCVTVRLPPVATLTEGAVAAIHPGWRSVTGGIRVMVIAASRPLGPIPERFAPVVRPLTGNHVEIIAPEEWVRVLGHADSVRSIRDQALDVIRRKIVDALAEDVPGVEVSAADVARWRSPGRFAALVRQWPNDHPLADVLWAWRRQDRHLWKGEAHERDQIAARRTDTWRHVAVWLCDQVAVIGHAPTPIAELSRVPVIEDGDDRQATLARAHRALAAPAELVSLIEIAAGQRGVRIVEIDGARLTATHHVCGEVTGDLARDSVMLWCSRCGIAFDQDANAATASLARTIGDLSSAKVQ

SEQ ID NO: 250 - protein, 598 aa, Unknown
  Description of Unknown: terrestrial-soil-tropical forest soil sequence
MPIRVYQFGLLPPIDGEARVRVLMRQCHEYRNELVAIERGRRAALRALHDTQEVADAVALVKASKGKPLREAIGKLYKARRAAEKAASHCPGVAEASVPEDASDAERSRLRRVNLEARAAAGDAVARITLLDESIRRDARALSPLSPGAWANYQTIEAAATQVRAMPLYERDAVTPSDPRFVKGPRAGQAFPVSNPKSCWWLGDQQVSMHIQGRTVTTADVLAGKDAWVRLELEPARLHGGTNGGKQQYSQYGVLKLRVANDTRCAVWASWPIKLHRAIPNAAKWQWVRVSCRRLARREVWTVEITLNDPQKIQPRPDVSGAVAVELLWTPLDDGSMRVASWRDSFGATGELLMSSRMVGAIRKADGIRSVRDTLLNALRPALAEKIQHSADKLPTWLREVGNVLHLWKSQDRFYELALRWRKDKVDAARDAYELLQEWELRDAHLLDYEAGSRRNGIGWRNHYYSNWAAGLARRYKAVIVPDRDLSLEARFGDDSDRRTTVSPQKLRDMLLNAFGEDAVKAVWKGPHGVPEDSDDTWLEVVSEQWRNEENTGGACAAEKDNAVADVGGSAWAKRKARARERAAGKDGARKDVGNTAE

SEQ ID NO: 251 - protein, 619 aa, Unknown
  Description of Unknown: terrestrial-soil-tropical forest soil sequence
MFGRKRDTAGATIRAYEFGTRPVGDMALASQQLYRRHQLWNQFVEIERDTRAKYRALVATESTQRVAALHEQLEELRQQIRLHKKSAAYEHVLHGKLRSLVEAMQSALADRSPETVAIVKPRLYFADIVSYDGLRERAKQLRQALGVMRAEAKAESRAKAEQLKAEREQLERERTDRVKAAMAASNLYWCNSDDVRASYEVARKRAMREGTELHFHRFDGGGKLSVRYQQGLPVAAAFGTDTRLQIDPIDFSIWESADRAVRRRCWTKARLRIGSNDQRQPVWLTLDCWLDGRPGRHLPMEGTIRAAAVIRRRVGTGFTHRLVLTVEAPLERRDLAVERHGTVGLDVGWRLTADNGLRVAYWSDGTAQGALTLPANMVGLFEKVHDLQSIRGQHFNAAVERLQGYLEEHPGAMWLQEQCRYIAQWRSPGRLIVLLRDWQSDGTDGELLEHLQAWRKKEDHLYSWQANLLDQTAAHRRELYRIFAASLGRYARVAIEEFDLRKVLQKPRPEDGAETPDGHMRTIAAVSVLRSAIENYCRREGVEFVVVPSSGTTRRCHVCQSEQQFDQRSDLVHRCTTCGETWDQDYNAAENIRQFADRPAGDTILPSAKISPEAPEARV

SEQ ID NO: 252 - protein, 592 aa, Unknown
  Description of Unknown: terrestrial-soil-tropical forest soil sequence
MIVHTLYIKTVDSETRKAVLAQMRAGHNYRNELVAIERGRRWALRQAHETPEVAEAIALLKAATRSNRFERLKALTRARRQAEEAIEKPQVYLACEAARIALRDEAAGTPRKKAAQAVYDAAREALCQSDEFHYAVGERDNWIRKAAYNDAKCNWGIRAVVNQAFEALRKTGLYERDGVTAWEPRFRRWAPNRPTGTIGVQLQGGLDVKDALSGDDTQVKLLLNPPIYKGSRQQRVRQFGELWVRIGSDGRSPIWARFNVMAHRALPTDAKIKWVKVHLTRTGPFERWEAHLTLDASAPPRPITNDRAVAVELLWSPQDDGSITAAHWRDGDGAEGFFALPAIIPTSIRKPDGIQSVRELLLNKMRPDLVALIKHYGSDLPVWLKEATNTLHLWESPLRFYDLAQCWRDSGFMGAKGAYDRLHEWELRDDHLWRYEACARKTAIRRRRDFYSCLAKNLSAQYRYVILPDRDLSRERRFGEERDIQFTVAPQELRAALTRCFGDETIEAPWRGAHGVEEDEYGDIDWLLFALEYGRDEKEARAAREAAKSSGDVKLTGGKWARIKAKRKEKDDAERGTRKESGKDAEGLGGER

SEQ ID NO: 253 - protein, 570 aa, Unknown
  Description of Unknown: terrestrial-soil-tropical forest soil sequence
MKRQAENVRSMVYQYGTVPARVAPVEGEELALSQMRLAQRLWNVLVTIERARVAGYRSIMRDEVQEQIDALRERKDATWQEIKATRQKARAKVATPGLDAEMMRIKTALRLLVEHKQSTKQQRHDARREQLNALAERANQRIKRARQAAASMGLFWGTYNAVIQSADAGRKHAGELRYQGFRGEGTVTAQVMGGATPEQCVAGGHPFFQVAPATPGQKWRYARVRIGSTSERQPLWVAIPVVYHREIPAEARIKSVSATRRILAGKVRWSLNVTVTLPPAEPRPAGQMVAIDIGWRLLPDGVRVAYWQDGTGNHSEVRIADSDIAQFRKISDLRSICDRAREEFLPSLVEWLKPYELDEEWTHRARALAQWRSNDRIAALIRWWADHRLSGDAEIYQTAVEWRRQYLHLANWWRNQQEQMTLRVREQYRRFAAGIASQFATVIVEDFDLRQVTETTEKAVGTYRQMVSPSLFRAAVINACKREGVEIRIVSGAYSTGACHNCQHIEVWDQAASILHRCGACGALWDQDHNAAINLLASGGVVLWRINLVAAIGPLSQDRSQTGGKEAVES

SEQ ID NO: 254 - protein, 612 aa, Unknown
  Description of Unknown: terrestrial-soil-tropical peatland sequence
MTARVYEYGLLDPTYNAQLVDDQMRAGHRYRNVLVEIERDRRTEVRNLLARHPDVEPLEAELLAARNDLADRRGQIRLQRKSTRTRSEGASMREAAHAAKLRVAEIRQRVNDAKAAIKEDAVVQAAIATADARAAERVRQARASCATYWGTYILHEADVARARASGGEVHFARWTGEGRVSAQIQGGIPSTDLAADTQVQIAPGQSIKDRRVPPNAKILRLRVQSDAKGKAIWAEWPMILHRPLPEEGRIKVVTVHKRRRDCRRWQWTVTFTVELLDGWTRGKCGEGAIALNLGYCRSYDHLKGAIRAGYLIDDRGQEREVIVPTSIIDRINKSEAIRSQRDKDVDTMRALLVAWLRDHEAILPGWIVDRTILAKAPKDANSPEAPRIWHITAWKSAARFRALAFAWRAARFQGDDVGYDLIERWRYRDEHLQRYEAGLLRGALLHRRDLYRQLAAELSAKYRTIVLHDTDLSDLQRSPHPEEDRREIGGAKYNQRIAAGSILRGALDNAFKRAGGEVVIVDDHRITKACWKCSEAEDWNQLDREHICGACGTRWDQDANACHNMLARERAGAEGRRQAARAAKTADRKETRSERLRRGLATKRKTEAARAM

SEQ ID NO: 255 - protein, 565 aa, Unknown
  Description of Unknown: terrestrial-soil-tropical peatland sequence
MFGNKSLPSRIYSYGANPAIENQKLVEDQMFLAHRYRNAMVEAEIERRKKVDEKLLSLSPSLARIEEKLAAATEELEKLRESIKEDHKLYFTKTAKDPVKTKAIAAQKKLVKGLYTERKALRTKLFASSKWKKEQEAIEAEALAAHKELREKSDLYWGTYLLVEQSMQGSRSGAPPRFMRWDGDGHIALQIQNGMTVEEALSGADTRLAIIPGRVEVDGSRTKETGIKRKLGTALCKFRIGTDEKTHSPIFASIPFHMHRPLPEDAQIKWVHFIRRRVSTHCEWRLQFVLSQKKWVKEDQAQEGTVGIDLGWSLDQEGYLQVACFAGSDGESGRLFLPADWLGEMKRVEGIRSIRDQNFNDAKALLQAFLRTSKEKSWLKEEAKTLPQWRSPAKLAWVIQKWRKERIPGDQHIFQAMEAWRLRDKHLYEFEANLRDQLLRRRESIYRNFAADLRRSYKTARILKLALKEVHELPQAEEAPENPQLREHSRDACLSFLVRCLRESMARTVEIDPKNQARRHHGCGSLEDLGANEKLHTCSRCGEIYERHENTARNLLGMMPAGAGV

SEQ ID NO: 256 - protein, 705 aa, Unknown
  Description of Unknown: terrestrial-soil-tropical peatland sequence
MERLPTETSPLDVVEMEREIDEARTATGWPTATVVHRYGIASPHEGADIVHEQIRLARAYRRELVTIERARRAAARQAMTELAPEVGFAEATVVGADAACQWLAAEIRAARAATRKRAESRGMRDRLTRARASLRTHRAELFALRSRYATQCADCRKAKSESVPCPHATAEARRLLERVDAVNDQAAAAQRRARGECGVYWGSYLLVERAMQASRAMPLYADDGVSPNDPSVPHSLSDSLGCQIQSTRPLTVAGAAAGTDSRLRIQPPPWPEAWLHEARLDPSAQSHPSHRLPGQRPDGTPAPATRADGTPARWVRDRACRQGEVRMRVGANGEWAAWRLDEHRAMPPNAAVKWATVVRRQRGPHTEWSLCLTLEVPLPEALPQTGRTVAVDVGWRQIGDELRVAAWQDSDGQKGELRLTKADLHALNASAEVRSLRDGKMESIKQRLAQWSAVASPQDCPEWIREALRTVRLWRNPVRLVRLLRQWREAGEPTRVVPRVAFDHLVAWADDDRHRWAEQESRRVWGLRRRRERYRVFAAELAKRYDAVVLEQFDLRRVAARPQTGRELESENEVARSNRQRASVSELRDALRNACRSRGRVVVAVDATDSTRTCPSCGLVADRGQDERVVLRCECGHEWDQDRDGAALVLLRRYREHPGDAKTLVAARAGATLAEPPKKKNDRWARARRMSTQKKERAQGARDSG

SEQ ID NO: 257 - protein, 640 aa, Unknown
  Description of Unknown: terrestrial-soil-tropical peatland sequence
MENQGEESAAAVPSEEEAPLDARVYQFGLLPPRVNRDLVEDQMYLGHRYRCQLVEFERDRRDAVREILSSQSGVEEIEARIADLAARRDAARAEIASKRSRSRSRSDSAEERATVREIGRQLKALRAEAKEARSIVASDEHVGAWISAENDRAAQRQKDARVACGVYWGTYLLHESDAQRARTGKSYPKFPRWNGDGRVAVQLQGGLSPQKLDHGQDTRLQVVSSSHRTGRRLGRGSLLRMRVQSNGRDPVWAEWPMILHRPLPEGVRIKTATVSRRRRGSQVDWCATITVDEPPRPIRATATEEAVAINLGYARRPNGGIRVGYWVGSDGAGGEILCQGSAAYRPRSSEEQIRAAVTHVEESLKKADSIRSFRDRGMNEMRARLIAWIDDFVGGDPPDGVPWWIADARRHLHLWRSPNRFASLLRRWERGWWPDLDGGYAILLAWSRRDLHLERYETGMRTTARRDRREGYRLLAARLAARYRTLVVDDADFRNFQRSPEPESDYVEVDAQKWQQRVASPSELRFAFLSAFGVDRTAKEPCEDVTRRHAPCGHVVDVAGDSRELRCPHCSEVEKREVLFDQDANACDNLLRGWLRKAPEMRQARTKRPPSIRRQRMIAGAKKKREAKAAEERRREARGG

SEQ ID NO: 258 - protein, 666 aa, Unknown
  Description of Unknown: terrestrial-soil-vadose zone soil sequence
MATLVYRYGVRAHGSARQQDAVVSDPAMLEQLRLGHELRNALVGVQHRYEDGKRAVWSGFASVAAADHRVTTGETAVAELEKQARAEHSADRTAATRQGTAESLKAARAAVKQARADRKAAMAAVAEQAKPKIQALGDDRDAEIKDLYRRFCQDGVLLPRCGRCAGDLRSDGDCTDCGAAHEPRKLYWATYNAIREDHQTAVKLVEAKRKAGQPARLRFRRWTGDGTLTVQLQRMHGPACRCVTCAEKLTRRARKTDPQAPAVAADPAYPPTDPPRDPALLASGQGKWRNVLQLGTWIPPGEWSAMSRAERRRVGRSHIGWQLGGGRQLTLPVQLHRQMPADADVAMAQLTRVRVGGRHRMSVALTAKLPDPPQVQGLPPVALHLGWRQRPDGSLRVATWACPQPLDLPPAVADVVVSHGGRWGEVIMPARWLADAEVPPRLLGRRDKAMEPVLEALADWLEAHTEACTARMTPALVRRWRSQGRLAGLTNRWRGQPPTGSAEILTYLEAWRIQDKLLWERESHLRRRLAARRDDAWRRVASWLARHAGVLVVDDADIAELRRRDDPADTDPTMPASAAQAARARAALAAPGRLRHLATITATRDGLGVHTVASAGLTRLHRKCGHQAQPDPRYAASAVVTCPGCGNGYDQDYNAAMLMLDRQQQP

SEQ ID NO: 259 - protein, 670 aa, Unknown
  Description of Unknown: terrestrial-soil-vadose zone soil sequence
MENNITVMRYGARVPITGLESVDRQLRLSKKYRNALCEIERRRRDGIARVQHGTRAGASPLDADELLAPLILKIDELEASISEMRKQTKLTHAGGGNPAARASLRDQIAAVKADLAVLRWLRGWSKSRLRLSDDERAAIAMCDGEKMSAWMIHRVKPWWALGVAVHATMNGSAALRLRCEYMIIDETAKYERRQARAVAGLSPGTYLLIEAAADKWRQNPEQPRFMRYDGTGRVGVQVQGGCTVAELEGGQDTRMRLLPATEIDPPVAPTSSRQIARAIAYGVVHFCRAGNMAPRDTYRILQLRVETMGRAPVWASIPIVYHRPLPADGVIVAAWLQRKKIGVRSVYDAQLVVRAAMTPQSHRPTTGTIAVDIGSRDIPSTGETRVAYSLDSSGAHAAMILPLFRLSSATSRGTGRRRIVPDDEKKIDDIKSIRSRHLDEIRDQITAYKVSVGAAASSPHPVPAIEWLRAATDRITSWRSPARIVWLRRQWQHHTGDEKIFSSIEAYIRQDRHLLDWQSREMRRRLGRRRELYRTAAMRLARTYDTIILAARDYRREEWVPEDAPSTRAHESRSIMRGAAPGEFREIIRRSAKKYGTTLIEMPLEGDTAWALDYRVCQRMLASTEVVDVQAAPLASASRSNHYGTDESFHRRRLGTDERIDPLARIDVSG

SEQ ID NO: 260 - protein, 479 aa, Unknown
  Description of Unknown: terrestrial-soil-vadose zone soil sequence
MIVYRYGALKPTEGFDLLLTQLRLACRYRNALVELLNWRIIAEQSGVERSAAKLVHAEMSCWLRSRCGLGWGTYQAIEADVRRAAKSPYRAPRKVSGRARWFAQVRQIKIQRPPDADGNQDAQVREIGLDPTKFRARFRRFDGTGRLGANIQACSGATTDDVLSGRGSLRLSAPEGRVTARLYLGLGIHVTLPVIAHRPLPPGVQVVRALICVERVGDRYVYSVHVTMRHERPERQYGSGRAAINFGWRSLGDRGVRIAYVATDEGSTDELILPRRLIDKLRHSESLRGLADDAAVAYLGDARGRTRARREALRDPSATHRELGRVPIEGEPISAEHWARRDRHLYQWERDEYAKVLRQRREIYRLWVRSLAAKYGSVVMEDYDLPTLISRDQPTEIPEARHVRFLVAPGSLRAEVQSVFGERATLATIKRRTMVCSVCGCELTGDRVRDVVLYCEQCDAQRDQDANNAANQLIDTAAE

SEQ ID NO: 261 - protein, 545 aa, Unknown
  Description of Unknown: terrestrial-soil-vadose zone soil sequence
MSTIVYRFGVHGAPLDNLELVKQQMRAAHNYANDLVAIERGRRTALHAIDDVPDVRNTIETVRQSTKSTRKAAITALRLARKAARAAAEEELARVQALDESIRRDARAITVCYWGSYLTIEMSAQQQRSQPLYEDDAITPNLPRFRGWREEGQIGIQIQKGLPTSAVRACTDTRARLDRSDRKKQGSKGRSVEYADLWIRIGSDGRAPIWTRVRVIMHRQIPDAAQWKWVRLSYRREGRTFAWSVEISVDVDRPKRTLDTTLRGAIAIEPQWSENADGSIVCATYRTEDGSSGEIELSPRIVGALRKADSIRAVRDMILNEARKDIHRALVEAGPALPVWLKDARNTMHLWKSQERFYRLANHWRRERCDAAREAYDRLQEWELRDDHLWRYEAGSRGQAIRSRNDFYHVIASQFARKHRFVIVPKRDYSREARFGAESDLRFIVSPSSLVSALDCSFDHGESAYVCPWVRPDGDGDSAEWPAIAIERFCAGDSAMIARKIRKENDSEEKQESAWARRKRLKREKEMRLATARITDGNGTKSLGQ

SEQ ID NO: 262 - protein, 632 aa, Unknown
  Description of Unknown: wastewater-nutrient removal-wastewater effluent sequence
MSTLVYRFGLLPPHENDALVRSQMRLAHRYRNDLVQIERARRAAVRDVARAAPEVARLELEAARTDAACAKVGGQIKAARAAGRTRKDSVELIEQLKALRIEHKEVVLALREARKTARVAAEPVLAEIEERVAAMRRGARAICGVYWGTYLMIEDADQAMRKMPLYDKDAEPSDPRFVPWTGDGSVGVQIQGGMTGEDTADDTRLRIESAAPPPGADPNSKRSLRRRYCVLAMRVGSEGRDPVWARWRMVMERPLPADARIKRAAVKLRRVGPREEWSVTITLETAERDRRVSDQVGMVGIDLGWRLMPDGLRVAAWHGSDGASGFLTLPDTRPTFHTTPGGRTRSSALGVVDAARKVEDLSSKRDKAFNEARSAIARIEGAPPWFELATKTISQWKSQGRLAALVRRWRDARWDGDAEAYEEAEKWRYHDHHLWAWETSQQAKALRARREVFRLFAADMAKRYARLAIEGLDLRAFARKTDDDTNETARRNRVVVAPSKLREALLLAFGSAINHWAETPKGDRVVVVEAAGTTMVHHECGSVERWDQATHVSHLCSSCGEIFDQDANAAKNILAAGERLGGPVLSGAARNDENVSNLSQVREGRWAKAKRMKAEKDARLEAARKAAPSAAE

SEQ ID NO: 263 - DNA, 37 bp, Artificial Sequence
  Description of Artificial Sequence: Synthetic oligonucleotide
gttgcaatgcctagctcagaggtttaaagactgagac

SEQ ID NO: 264 - DNA, 36 bp, Artificial Sequence
  Description of Artificial Sequence: Synthetic oligonucleotide
gtgtcaacgccagcgcggaggcgtcaaatccgcgac

SEQ ID NO: 265 - DNA, 25 bp, Artificial Sequence
  Description of Artificial Sequence: Synthetic oligonucleotide
gtagcaatgcctagctcaggggctt

SEQ ID NO: 266 - DNA, 36 bp, Artificial Sequence
  Description of Artificial Sequence: Synthetic oligonucleotide
gttacaaaccctgctcattgggttggttaatgagac

SEQ ID NO: 267 - DNA, 36 bp, Artificial Sequence
  Description of Artificial Sequence: Synthetic oligonucleotide
gtgagaatgaccagcgcaccggtcgaaaggtgcgac

SEQ ID NO: 268 - DNA, 36 bp, Artificial Sequence
  Description of Artificial Sequence: Synthetic oligonucleotide
gtgtcatagcccagcttggcgggcgaaggccaagac

SEQ ID NO: 269 - DNA, 36 bp, Artificial Sequence
  Description of Artificial Sequence: Synthetic oligonucleotide
gttgacatgcgtgctccgccgctttgtagtggagac

SEQ ID NO: 270 - DNA, 36 bp, Artificial Sequence
  Description of Artificial Sequence: Synthetic oligonucleotide
ttgataatgcccgctctgcggcctcgtagtagagac

SEQ ID NO: 271 - DNA, 32 bp, Artificial Sequence
  Description of Artificial Sequence: Synthetic oligonucleotide
caacgcctacagtgggcttcgtacattgtgac

SEQ ID NO: 272 - DNA, 28 bp, Artificial Sequence
  Description of Artificial Sequence: Synthetic oligonucleotide
cagcggcccacgcacgcgagggacggtc

SEQ ID NO: 273 - DNA, 37 bp, Artificial Sequence
  Description of Artificial Sequence: Synthetic oligonucleotide
caagcaagccttgccgaagaggctcgatcttcggacg

SEQ ID NO: 274 - DNA, 36 bp, Artificial Sequence
  Description of Artificial Sequence: Synthetic oligonucleotide
atgataagagtttctcgatactctataaatcgagac

SEQ ID NO: 275 - DNA, 36 bp, Artificial Sequence
  Description of Artificial Sequence: Synthetic oligonucleotide
caagcaagccttgccgaagaggctcgatcttcggac

SEQ ID NO: 276 - DNA, 37 bp, Artificial Sequence
  Description of Artificial Sequence: Synthetic oligonucleotide
ggttgaagcgcccgcgcaagggctttgtacttgcgac

SEQ ID NO: 277 - DNA, 36 bp, Artificial Sequence
  Description of Artificial Sequence: Synthetic oligonucleotide
gtcgcaatgccagccgaacggcttggaagttcggac

SEQ ID NO: 278 - DNA, 36 bp, Artificial Sequence
  Description of Artificial Sequence: Synthetic oligonucleotide
gtggctacggcatcgcggcgcctcggagatcgcgac

SEQ ID NO: 279 - DNA, 36 bp, Artificial Sequence
  Description of Artificial Sequence: Synthetic oligonucleotide
gtcgcagaggaagctcgacggatcgagcgtcgagag

SEQ ID NO: 280 - DNA, 36 bp, Artificial Sequence
  Description of Artificial Sequence: Synthetic oligonucleotide
gtcgcgatcgaagctccatcggctggcgatggagac

SEQ ID NO: 281 - DNA, 36 bp, Artificial Sequence
  Description of Artificial Sequence: Synthetic oligonucleotide
ccagaaagggcagcgcatcgcccaggagaatgcgac

SEQ ID NO: 282 - DNA, 37 bp, Artificial Sequence
  Description of Artificial Sequence: Synthetic oligonucleotide
gtagcaacgccagctcggttggttctgagccgagaca

SEQ ID NO: 283 - DNA, 36 bp, Artificial Sequence
  Description of Artificial Sequence: Synthetic oligonucleotide
gtggaaacgtcaatgtccggcggacgacgctggaac

SEQ ID NO: 284 - DNA, 51 bp, Artificial Sequence
  Description of Artificial Sequence: Synthetic oligonucleotide
cgctgcagggcctcaaacgactagacgaggcactggcaagctacgacaagg

SEQ ID NO: 285 - DNA, 24 bp, Artificial Sequence
  Description of Artificial Sequence: Synthetic oligonucleotide
ccaacaacggctgctgagcgcctt

SEQ ID NO: 286 - DNA, 28 bp, Artificial Sequence
  Description of Artificial Sequence: Synthetic oligonucleotide
ggctgctgagcgccttacaagctcagac

SEQ ID NO: 287 - DNA, 36 bp, Artificial Sequence
  Description of Artificial Sequence: Synthetic oligonucleotide
gtaacaacccctagcgcaagagggaaagcttgcgac

SEQ ID NO: 288 - DNA, 36 bp, Artificial Sequence
  Description of Artificial Sequence: Synthetic oligonucleotide
ccaacagcggctgctgaacgccttacaagttcagac

SEQ ID NO: 289 - DNA, 36 bp, Artificial Sequence
  Description of Artificial Sequence: Synthetic oligonucleotide
ctcacagtgcctgcgcagcggcttcgtagctgcgac

SEQ ID NO: 290 - DNA, 36 bp, Artificial Sequence
  Description of Artificial Sequence: Synthetic oligonucleotide
ccaacaacggctgctgaacgccttacaagttcagac

SEQ ID NO: 291 - DNA, 36 bp, Artificial Sequence
  Description of Artificial Sequence: Synthetic oligonucleotide
gttgcaatgcctgctcataggcttggtttatgagac

SEQ ID NO: 292 - DNA, 37 bp, Artificial Sequence
  Description of Artificial Sequence: Synthetic oligonucleotide
gtagcaataccctagctcgaggggggtttgtcgagac

SEQ ID NO: 293 - DNA, 37 bp, Artificial Sequence
  Description of Artificial Sequence: Synthetic oligonucleotide
gtttcagtatcctgctcagaggagtcgtttctgagac

SEQ ID NO: 294 - DNA, 39 bp, Artificial Sequence
  Description of Artificial Sequence: Synthetic oligonucleotide
gcgacgacaacggcagctcatcgccacgaaagatgagac

SEQ ID NO: 295 - DNA, 23 bp, Artificial Sequence
  Description of Artificial Sequence: Synthetic oligonucleotide
gtgcagggctgtcgaacctgcga

SEQ ID NO: 296 - DNA, 19 bp, Artificial Sequence
  Description of Artificial Sequence: Synthetic oligonucleotide
gctgggatgtttagtgatc

SEQ ID NO: 297 - DNA, 25 bp, Artificial Sequence
  Description of Artificial Sequence: Synthetic oligonucleotide
gctgggaggtttagtgatcccagac

SEQ ID NO: 298 - DNA, 37 bp, Artificial Sequence
  Description of Artificial Sequence: Synthetic oligonucleotide
gtcacaatgcctgcgcagaggctttgtttctgcgacg

SEQ ID NO: 299 - DNA, 36 bp, Artificial Sequence
  Description of Artificial Sequence: Synthetic oligonucleotide
gtatcaatgcctgctcaagggctttgtgcttgagac

SEQ ID NO: 300 - DNA, 36 bp, Artificial Sequence
  Description of Artificial Sequence: Synthetic oligonucleotide
ctcgcaatgccagcccagaggcggatgttctgggac

SEQ ID NO: 301 - DNA, 36 bp, Artificial Sequence
  Description of Artificial Sequence: Synthetic oligonucleotide
ctttcaagacgagcggaagcgtctgcttcttccgac

SEQ ID NO: 302 - DNA, 36 bp, Artificial Sequence
  Description of Artificial Sequence: Synthetic oligonucleotide
atcgaagagcctgctcaggggctttgttcttgagac

SEQ ID NO: 303 - DNA, 34 bp, Artificial Sequence
  Description of Artificial Sequence: Synthetic oligonucleotide
ctttcaagacgagcggaagcgtctgcttcttccg

SEQ ID NO: 304 - DNA, 24 bp, Artificial Sequence
  Description of Artificial Sequence: Synthetic oligonucleotide
taagtgtcagtgcctgcgcaccgg

SEQ ID NO: 305 - DNA, 37 bp, Artificial Sequence
  Description of Artificial Sequence: Synthetic oligonucleotide
caaacaatgcccgcgcagtgggcttcgtcactgcgac

SEQ ID NO: 306 - DNA, 36 bp, Artificial Sequence
  Description of Artificial Sequence: Synthetic oligonucleotide
gtagtaacgcccgcgaacaggcttcgtttgttcgac

SEQ ID NO: 307 - DNA, 37 bp, Artificial Sequence
  Description of Artificial Sequence: Synthetic oligonucleotide
cgttgcaagggctgcgcgacaccctggaagtcgcgac

SEQ ID NO: 308 - DNA, 37 bp, Artificial Sequence
  Description of Artificial Sequence: Synthetic oligonucleotide
gtcgcaatggggcgctcaccccccttgtaagtgagac

SEQ ID NO: 309 - DNA, 36 bp, Artificial Sequence
  Description of Artificial Sequence: Synthetic oligonucleotide
gtggcaaaggcatcgaatcgcctgagaagattcgac

SEQ ID NO: 310 - DNA, 31 bp, Artificial Sequence
  Description of Artificial Sequence: Synthetic oligonucleotide
aacgcctgcgaacaggcttcgtttgttcgac

SEQ ID NO: 311 - DNA, 37 bp, Artificial Sequence
  Description of Artificial Sequence: Synthetic oligonucleotide
gtcgcaatggggcgctcaccccctttgtaagtgagac

SEQ ID NO: 312 - DNA, 36 bp, Artificial Sequence
  Description of Artificial Sequence: Synthetic oligonucleotide
gttgcaagggctgcgcgacaccctggaagtcgcgac

SEQ ID NO: 313 - DNA, 39 bp, Artificial Sequence
  Description of Artificial Sequence: Synthetic oligonucleotide
gggtggcagtgcctgctcagaggcttagtatctgtgaca

SEQ ID NO: 314 - DNA, 38 bp, Artificial Sequence
  Description of Artificial Sequence: Synthetic oligonucleotide
tgtggcagtgcctgctcagaggcttagtatctgtgaca

SEQ ID NO: 315 - DNA, 36 bp, Artificial Sequence
  Description of Artificial Sequence: Synthetic oligonucleotide
gttgcaagggttgcgcgacaccctggaagtcgcgac

SEQ ID NO: 316 - DNA, 36 bp, Artificial Sequence
  Description of Artificial Sequence: Synthetic oligonucleotide
gtgcaaatgcccgcacagaggcttagtgtctgtgac

SEQ ID NO: 317 - DNA, 36 bp, Artificial Sequence
  Description of Artificial Sequence: Synthetic oligonucleotide
gtcacaacgcccgcgcaggggcttggtatctgcgac

SEQ ID NO: 318 - DNA, 36 bp, Artificial Sequence
  Description of Artificial Sequence: Synthetic oligonucleotide
ctttcaaagcttgctcgttagctttatgaacgagac

SEQ ID NO: 319 - DNA, 29 bp, Artificial Sequence
  Description of Artificial Sequence: Synthetic oligonucleotide
gtttgaaagcagctatagagggcagaaac

SEQ ID NO: 320 - DNA, 33 bp, Artificial Sequence
  Description of Artificial Sequence: Synthetic oligonucleotide
gcaagggctgctcagggccctggaatctgagac

SEQ ID NO: 321 - DNA, 36 bp, Artificial Sequence
  Description of Artificial Sequence: Synthetic oligonucleotide
atttaatgaccctgcgtgttggggtgtgaacacgac

SEQ ID NO: 322 - DNA, 36 bp, Artificial Sequence
  Description of Artificial Sequence: Synthetic oligonucleotide
cttacaatacctgcgagacggtttagaagtctcgac

SEQ ID NO: 323 - DNA, 36 bp, Artificial Sequence
  Description of Artificial Sequence: Synthetic oligonucleotide
ccttcaatccctgcgagacgggttagaagtctcgac

SEQ ID NO: 324 - DNA, 36 bp, Artificial Sequence
  Description of Artificial Sequence: Synthetic oligonucleotide
gtaacaacaccagtccaaaggtttatgatttggaac

SEQ ID NO: 325 - DNA, 36 bp, Artificial Sequence
  Description of Artificial Sequence: Synthetic oligonucleotide
ctcgcggtcccatcggaacgggttgtggttccgaca

SEQ ID NO: 326 - DNA, 27 bp, Artificial Sequence
  Description of Artificial Sequence: Synthetic oligonucleotide
gtctcaacgcctactcaggggctttgt

SEQ ID NO: 327 - DNA, 36 bp, Artificial Sequence
  Description of Artificial Sequence: Synthetic oligonucleotide
cttgcaacggcagcgtaccgccttcaagtgtgcgac

SEQ ID NO: 328 - DNA, 37 bp, Artificial Sequence
  Description of Artificial Sequence: Synthetic oligonucleotide
ccttgcaacggcagcgtaccgccttcaagtgtgcgac

SEQ ID NO: 329 - DNA, 36 bp, Artificial Sequence
  Description of Artificial Sequence: Synthetic oligonucleotide
ccgggaacagccgcgcaggggcttggtgcctgcgac

SEQ ID NO: 330 - DNA, 39 bp, Artificial Sequence
  Description of Artificial Sequence: Synthetic oligonucleotide
cgtcgcaacgcctgcggagaggccttgtttctccgacgg

SEQ ID NO: 331 - DNA, 36 bp, Artificial Sequence
  Description of Artificial Sequence: Synthetic oligonucleotide
gtttcagacccatcgcaaggggttatagcttgcgac

SEQ ID NO: 332 - DNA, 36 bp, Artificial Sequence
  Description of Artificial Sequence: Synthetic oligonucleotide
gtcgcaacgcctgcggagaggccttgtttctccgac

SEQ ID NO: 333 - DNA, 36 bp, Artificial Sequence
  Description of Artificial Sequence: Synthetic oligonucleotide
gttgcaaagccatctccagggtttggtgctggagac

SEQ ID NO: 334 - DNA, 36 bp, Artificial Sequence
  Description of Artificial Sequence: Synthetic oligonucleotide
gttggaatgcctgtggaaaggctttgtatttccaac

SEQ ID NO: 335 - DNA, 34 bp, Artificial Sequence
  Description of Artificial Sequence: Synthetic oligonucleotide
agcaatgcgagcgcagacgcttcgtatctgcgac

SEQ ID NO: 336 - DNA, 36 bp, Artificial Sequence
  Description of Artificial Sequence: Synthetic oligonucleotide
gtcacaacgcctgcgcaagggctttgttattgcgac

SEQ ID NO: 337 - DNA, 37 bp, Artificial Sequence
  Description of Artificial Sequence: Synthetic oligonucleotide
cttccaatacctgcgagacggtttagaagtctcgacg

SEQ ID NO: 338 - DNA, 36 bp, Artificial Sequence
  Description of Artificial Sequence: Synthetic oligonucleotide
ggagcaatgcctgcacgagggctttgtgctcgtgac

SEQ ID NO: 339 - DNA, 36 bp, Artificial Sequence
  Description of Artificial Sequence: Synthetic oligonucleotide
gtcgcaacgcctgcgcggaggctttgtttccgcgac

SEQ ID NO: 340 - DNA, 36 bp, Artificial Sequence
  Description of Artificial Sequence: Synthetic oligonucleotide
atggaaatgccattacaaaggtttaggatttgtaac

SEQ ID NO: 341 - DNA, 29 bp, Artificial Sequence
  Description of Artificial Sequence: Synthetic oligonucleotide
tgtcgcaaagccatctccaaggcttggtg

SEQ ID NO: 342 - DNA, 36 bp, Artificial Sequence
  Description of Artificial Sequence: Synthetic oligonucleotide
ctcgcaatcgaagctccgcccgttgtaggcggagac

SEQ ID NO: 343 - DNA, 34 bp, Artificial Sequence
  Description of Artificial Sequence: Synthetic oligonucleotide
tggaagagccatcgcaatggcttcggattgcgac

SEQ ID NO: 344 - DNA, 36 bp, Artificial Sequence
  Description of Artificial Sequence: Synthetic oligonucleotide
cacgaaaaggcagctcgatgccttacaaatcgagac

SEQ ID NO: 345 - DNA, 34 bp, Artificial Sequence
  Description of Artificial Sequence: Synthetic oligonucleotide
agaaatggttgtgaaatgcctttaaaatttcaac

SEQ ID NO: 346 - DNA, 31 bp, Artificial Sequence
  Description of Artificial Sequence: Synthetic oligonucleotide
acagaaatggtagtggaatgcctttaaaatt

SEQ ID NO: 347 - DNA, 36 bp, Artificial Sequence
  Description of Artificial Sequence: Synthetic oligonucleotide
gccacagcacctgctcgaacggttcgagttcgagac

SEQ ID NO: 348 - DNA, 36 bp, Artificial Sequence
  Description of Artificial Sequence: Synthetic oligonucleotide
ctgaaaacgccagcgcgaaggcttcatattcgcgac

SEQ ID NO: 349 - DNA, 37 bp, Artificial Sequence
  Description of Artificial Sequence: Synthetic oligonucleotide
gtgcaagagcctgcgccgaggcgtcgtatcggcgaca

SEQ ID NO: 350 - DNA, 36 bp, Artificial Sequence
  Description of Artificial Sequence: Synthetic oligonucleotide
gtggaaagggtatctctggaccttacaatcagagac

SEQ ID NO: 351 - DNA, 22 bp, Artificial Sequence
  Description of Artificial Sequence: Synthetic oligonucleotide
gccgcaacgcctgtggaagggc

SEQ ID NO: 352 - DNA, 36 bp, Artificial Sequence
  Description of Artificial Sequence: Synthetic oligonucleotide
ggtgcagcggttgctcagcaccgtagaagctgagag

SEQ ID NO: 353 - DNA, 21 bp, Artificial Sequence
  Description of Artificial Sequence: Synthetic oligonucleotide
cccgtgcccgtctccgtctcc

SEQ ID NO: 354 - DNA, 22 bp, Artificial Sequence
  Description of Artificial Sequence: Synthetic oligonucleotide
gatcgcgacggcgacggtatcc

SEQ ID NO: 355 - DNA, 36 bp, Artificial Sequence
  Description of Artificial Sequence: Synthetic oligonucleotide
ggcgtccgccagcgtcggggcaaccacaccgacgac

SEQ ID NO: 356 - DNA, 37 bp, Artificial Sequence
  Description of Artificial Sequence: Synthetic oligonucleotide
gttgcagtgcccagctcaggggcttgataactgagac

SEQ ID NO: 357 - DNA, 26 bp, Artificial Sequence
  Description of Artificial Sequence: Synthetic oligonucleotide
tagtgagtttagcacatttctaaaac

SEQ ID NO: 358 - DNA, 36 bp, Artificial Sequence
  Description of Artificial Sequence: Synthetic oligonucleotide
gtttaagtagtagtgagtttagcacatctctaaaac

SEQ ID NO: 359 - DNA, 35 bp, Artificial Sequence
  Description of Artificial Sequence: Synthetic oligonucleotide
ttaagtagtagtgagtttagcatatttctaaaacg

SEQ ID NO: 360 - DNA, 33 bp, Artificial Sequence
  Description of Artificial Sequence: Synthetic oligonucleotide
taagtaatagtgagtttagcacatctctaaaac

SEQ ID NO: 361 - DNA, 34 bp, Artificial Sequence
  Description of Artificial Sequence: Synthetic oligonucleotide
ttaagtaatagtgagtttagcacatctctaaaac

SEQ ID NO: 362 - DNA, 36 bp, Artificial Sequence
  Description of Artificial Sequence: Synthetic oligonucleotide
ggttaagtagtagtgagtttagcacatctctaaaac

SEQ ID NO: 363 - DNA, 32 bp, Artificial Sequence
  Description of Artificial Sequence: Synthetic oligonucleotide
gtttaagtagtagtgagtttagcacatttcta

SEQ ID NO: 364 - DNA, 36 bp, Artificial Sequence
  Description of Artificial Sequence: Synthetic oligonucleotide
gtagcaatggcagcgcatcgccttttaagatgcgac

SEQ ID NO: 365 - DNA, 26 bp, Artificial Sequence
  Description of Artificial Sequence: Synthetic oligonucleotide
taatgagtttagcatatctctaaaac

SEQ ID NO: 366 - DNA, 23 bp, Artificial Sequence
  Description of Artificial Sequence: Synthetic oligonucleotide
tgagtttagcatatctctaaaac

SEQ ID NO: 367 - DNA, 36 bp, Artificial Sequence
  Description of Artificial Sequence: Synthetic oligonucleotide
ggttaagtagtagtgagtttagcatatctctaaaac

SEQ ID NO: 368 - DNA, 36 bp, Artificial Sequence
  Description of Artificial Sequence: Synthetic oligonucleotide
ggttaaatagtagtgagtttagcacatctctaaaac

SEQ ID NO: 369 - DNA, 36 bp, Artificial Sequence
  Description of Artificial Sequence: Synthetic oligonucleotide
gtaacagaggctgctcaatgcctttgaaattgagac

SEQ ID NO: 370 - DNA, 36 bp, Artificial Sequence
  Description of Artificial Sequence: Synthetic oligonucleotide
gtaacaatcccagtgcaacgggttagtagttgcaac

SEQ ID NO: 371 - DNA, 36 bp, Artificial Sequence
  Description of Artificial Sequence: Synthetic oligonucleotide
gtgtggaggcagctcggtgccgatggaaactgagac

SEQ ID NO: 372 - DNA, 36 bp, Artificial Sequence
  Description of Artificial Sequence: Synthetic oligonucleotide
cttgcaatggctgcgcagggccttggacgctgcgac

SEQ ID NO: 373 - DNA, 18 bp, Artificial Sequence
  Description of Artificial Sequence: Synthetic oligonucleotide
tcgaattcggttgacgct

SEQ ID NO: 374 - DNA, 37 bp, Artificial Sequence
  Description of Artificial Sequence: Synthetic oligonucleotide
gttggcaatagaagctaacctctataagcgttagacc

SEQ ID NO: 375 - DNA, 36 bp, Artificial Sequence
  Description of Artificial Sequence: Synthetic oligonucleotide
gtggagaggccagcgcaggggctttgtgcctgcgac

SEQ ID NO: 376 - DNA, 29 bp, Artificial Sequence
  Description of Artificial Sequence: Synthetic oligonucleotide
gttgaaaaccccatcgattcggggtagtg

SEQ ID NO: 377 - DNA, 36 bp, Artificial Sequence
  Description of Artificial Sequence: Synthetic oligonucleotide
ctcgcaagcgttgctcgacacgctaggtgtcgagac

SEQ ID NO: 378 - DNA, 23 bp, Artificial Sequence
  Description of Artificial Sequence: Synthetic oligonucleotide
tcgtcctgcagcgtgatcccgcc

SEQ ID NO: 379 - DNA, 39 bp, Artificial Sequence
  Description of Artificial Sequence: Synthetic oligonucleotide
gccgtcgaaatgcctgctcgggggcttcgtacctgagac

SEQ ID NO: 380 - DNA, 20 bp, Artificial Sequence
  Description of Artificial Sequence: Synthetic oligonucleotide
aagagcatcccgggcgcgaa

SEQ ID NO: 381 - DNA, 36 bp, Artificial Sequence
  Description of Artificial Sequence: Synthetic oligonucleotide
gtaggaacccctagtgtcctgggtggagaggacaac

SEQ ID NO: 382 - DNA, 24 bp, Artificial Sequence
  Description of Artificial Sequence: Synthetic oligonucleotide
gcgcgggggcttggttcctgcgac

SEQ ID NO: 383 - DNA, 36 bp, Artificial Sequence
  Description of Artificial Sequence: Synthetic oligonucleotide
gaaacaaagcgtgctctgccgcttggaagcagagac

SEQ ID NO: 384 - DNA, 18 bp, Artificial Sequence
  Description of Artificial Sequence: Synthetic oligonucleotide
cgtgacgatggttgctcg

SEQ ID NO: 385 - DNA, 31 bp, Artificial Sequence
  Description of Artificial Sequence: Synthetic oligonucleotide
aatccctgctcaagagggtgtgtcttgagac

SEQ ID NO: 386 - DNA, 36 bp, Artificial Sequence
  Description of Artificial Sequence: Synthetic oligonucleotide
ctcgcaatcgttgctggacggacttctcgttcagac

SEQ ID NO: 387 - DNA, 36 bp, Artificial Sequence
  Description of Artificial Sequence: Synthetic oligonucleotide
gtcgaaatgcccgctcagcggcttagttgctgagac

SEQ ID NO: 388 - DNA, 36 bp, Artificial Sequence
  Description of Artificial Sequence: Synthetic oligonucleotide
gtcgagatcaggctccatgagatcgaccatggagac

SEQ ID NO: 389 - DNA, 38 bp, Artificial Sequence
  Description of Artificial Sequence: Synthetic oligonucleotide
ggtgacaaagccctgtgcagcgggctcaaagctgcgac

SEQ ID NO: 390 - DNA, 36 bp, Artificial Sequence
  Description of Artificial Sequence: Synthetic oligonucleotide
gtcgcaacgcctgcgtcggggcctcgtgccgacgac

SEQ ID NO: 391 - DNA, 33 bp, Artificial Sequence
  Description of Artificial Sequence: Synthetic oligonucleotide
gcaatggctgctcagcgcccttgaagctgagac

SEQ ID NO: 392 - DNA, 28 bp, Artificial Sequence
  Description of Artificial Sequence: Synthetic oligonucleotide
agcctgcgcggtggctgaggaccgcgac

SEQ ID NO: 393 - DNA, 36 bp, Artificial Sequence
  Description of Artificial Sequence: Synthetic oligonucleotide
gtgtggaggctgctcaaggccgatggaacttgagac

SEQ ID NO: 394 - DNA, 37 bp, Artificial Sequence
  Description of Artificial Sequence: Synthetic oligonucleotide
ggtggcacgagttgctcggcgctctacgagccgagac

SEQ ID NO: 395 - DNA, 31 bp, Artificial Sequence
  Description of Artificial Sequence: Synthetic oligonucleotide
aacatctgctcgatcgatccgagatcgagcc

SEQ ID NO: 396 - DNA, 34 bp, Artificial Sequence
  Description of Artificial Sequence: Synthetic oligonucleotide
tggaaaccctgcgcagggggttaaagcctgcgac

SEQ ID NO: 397 - DNA, 36 bp, Artificial Sequence
  Description of Artificial Sequence: Synthetic oligonucleotide
gtctcaatggctgcgacgagccgtgcaatcgtcgac

SEQ ID NO: 398 - DNA, 21 bp, Artificial Sequence
  Description of Artificial Sequence: Synthetic oligonucleotide
cgcaagcattcgtcacaatca

SEQ ID NO: 399 - DNA, 36 bp, Artificial Sequence
  Description of Artificial Sequence: Synthetic oligonucleotide
gttgtagaggtaacgaagcacctgaaagacttcgag

SEQ ID NO: 400 - DNA, 20 bp, Artificial Sequence
  Description of Artificial Sequence: Synthetic oligonucleotide
ggtagcgaaacaccttgaag

SEQ ID NO: 401 - DNA, 36 bp, Artificial Sequence
  Description of Artificial Sequence: Synthetic oligonucleotide
gtggaaaagagcagcgcggggctccaacgccgcgac

SEQ ID NO: 402 - DNA, 36 bp, Artificial Sequence
  Description of Artificial Sequence: Synthetic oligonucleotide
gctgcaaaggacgtggcgttccttgaacacgccaac

SEQ ID NO: 403 - DNA, 37 bp, Artificial Sequence
  Description of Artificial Sequence: Synthetic oligonucleotide
gttgcaatgccgactccgcggcttggttgcggagagg

SEQ ID NO: 404 - DNA, 36 bp, Artificial Sequence
  Description of Artificial Sequence: Synthetic oligonucleotide
gtcgcaggtgatgctctgaggctttggatcggagac

SEQ ID NO: 405 - DNA, 36 bp, Artificial Sequence
  Description of Artificial Sequence: Synthetic oligonucleotide
gtggaaagggcagcgcagagcccgtgatgctgcgac

SEQ ID NO: 406 - DNA, 33 bp, Artificial Sequence
  Description of Artificial Sequence: Synthetic oligonucleotide
cggcgtgccctcgtcctgcaccgtgatcccggc

SEQ ID NO: 407 - DNA, 36 bp, Artificial Sequence
  Description of Artificial Sequence: Synthetic oligonucleotide
gcgactgcgtttgctcggtgacgggttcaccgagac

SEQ ID NO: 408 - DNA, 36 bp, Artificial Sequence
  Description of Artificial Sequence: Synthetic oligonucleotide
gtaacaatgccagcccagaggcaaaggttctgggac

SEQ ID NO: 409 - DNA, 28 bp, Artificial Sequence
  Description of Artificial Sequence: Synthetic oligonucleotide
gtgcagcccctgggcacgtgggcgacgg

SEQ ID NO: 410 - DNA, 37 bp, Artificial Sequence
  Description of Artificial Sequence: Synthetic oligonucleotide
gatcacacggcgacctccgccgcctcgaagcggagac

SEQ ID NO: 411 - DNA, 36 bp, Artificial Sequence
  Description of Artificial Sequence: Synthetic oligonucleotide
ctcacaacggcagcgaggcgccttggagtcctcgac

SEQ ID NO: 412 - DNA, 36 bp, Artificial Sequence
  Description of Artificial Sequence: Synthetic oligonucleotide
gtagcaagaggtgctcatgcctctagaatatgagac

SEQ ID NO: 413 - DNA, 36 bp, Artificial Sequence
  Description of Artificial Sequence: Synthetic oligonucleotide
gtagcaaaggcagcttgacgccttaaagatcaagac

SEQ ID NO: 414 - DNA, 36 bp, Artificial Sequence
  Description of Artificial Sequence: Synthetic oligonucleotide
ctcgcaacgccagcgcaggggccatgacgctgcgac

SEQ ID NO: 415 - DNA, 36 bp, Artificial Sequence
  Description of Artificial Sequence: Synthetic oligonucleotide
gcatcaaaggcagtccgatgcctctcaaatcggaac

SEQ ID NO: 416 - DNA, 36 bp, Artificial Sequence
  Description of Artificial Sequence: Synthetic oligonucleotide
gttggaaaggctgctcgaacgccttcaagtcgagag

SEQ ID NO: 417 - DNA, 27 bp, Artificial Sequence
  Description of Artificial Sequence: Synthetic oligonucleotide
ccgtgcgcagccggataacgctgcgac

SEQ ID NO: 418 - DNA, 36 bp, Artificial Sequence
  Description of Artificial Sequence: Synthetic oligonucleotide
gtcgcgaagctagcgcagaagcttggtatctgcgag

SEQ ID NO: 419 - DNA, 19 bp, Artificial Sequence
  Description of Artificial Sequence: Synthetic oligonucleotide
gcatcaagtcttatctcgc

SEQ ID NO: 420 - DNA, 20 bp, Artificial Sequence
  Description of Artificial Sequence: Synthetic oligonucleotide
ggcagcgaaacgccttgaag

SEQ ID NO: 421 - DNA, 36 bp, Artificial Sequence
  Description of Artificial Sequence: Synthetic oligonucleotide
gtgtaatgcccggcagaaggctttggattctgcgac

SEQ ID NO: 422 - DNA, 37 bp, Artificial Sequence
  Description of Artificial Sequence: Synthetic oligonucleotide
gtagcaatgcctaccaagaggctttgtatcttgtgag

SEQ ID NO: 423 - DNA, 37 bp, Artificial Sequence
  Description of Artificial Sequence: Synthetic oligonucleotide
ggcgcaagccctgcgcgggagggcaagatcctgcgac

SEQ ID NO: 424 - DNA, 19 bp, Artificial Sequence
  Description of Artificial Sequence: Synthetic oligonucleotide
caagccacgctcgggtggc

SEQ ID NO: 425 - DNA, 23 bp, Artificial Sequence
  Description of Artificial Sequence: Synthetic oligonucleotide
ggagagggatcgtttcttcgacc

SEQ ID NO: 426 - DNA, 36 bp, Artificial Sequence
  Description of Artificial Sequence: Synthetic oligonucleotide
ccgacaacgcctgcgcaggggcgtggtttctgcgac

SEQ ID NO: 427 - DNA, 37 bp, Artificial Sequence
  Description of Artificial Sequence: Synthetic oligonucleotide
ggtgcaacgtgccttgcgagggcttgatactcgcgac

SEQ ID NO: 428 - DNA, 36 bp, Artificial Sequence
  Description of Artificial Sequence: Synthetic oligonucleotide
gtggtaatggcagcgcagcgcctttgagactgcgac

SEQ ID NO: 429 - DNA, 37 bp, Artificial Sequence
  Description of Artificial Sequence: Synthetic oligonucleotide
gttgcagtaccctgctcacgggggagacaagtgagag

SEQ ID NO: 430 - DNA, 36 bp, Artificial Sequence
  Description of Artificial Sequence: Synthetic oligonucleotide
ggtgaaatggcatcgggaggccacaaacgttccgac

SEQ ID NO: 431 - DNA, 27 bp, Artificial Sequence
  Description of Artificial Sequence: Synthetic oligonucleotide
gtgatagtgcctgctcagtggcttagt

SEQ ID NO: 432 - DNA, 36 bp, Artificial Sequence
  Description of Artificial Sequence: Synthetic oligonucleotide
gtgacaagagcagcgcggcgctctgcgagccgcgac

SEQ ID NO: 433 - DNA, 23 bp, Artificial Sequence
  Description of Artificial Sequence: Synthetic oligonucleotide
cgagtaggcttagtttgctcgac

SEQ ID NO: 434 - DNA, 36 bp, Artificial Sequence
  Description of Artificial Sequence: Synthetic oligonucleotide
ggcgaagcgtcagcgcagccgtctcgaggctgcgac

SEQ ID NO: 435 - DNA, 36 bp, Artificial Sequence
  Description of Artificial Sequence: Synthetic oligonucleotide
gtcgcgatggctgctcgacgccaggaagatcgagac

SEQ ID NO: 436 - DNA, 36 bp, Artificial Sequence
  Description of Artificial Sequence: Synthetic oligonucleotide
gtcgaaatgcccgcgcgggggcgtcgtacccgcgac

SEQ ID NO: 437 - DNA, 40 bp, Artificial Sequence
  Description of Artificial Sequence: Synthetic oligonucleotide
gcgtgtagtaagagcagcggtgtcgctctgagatgccgac

SEQ ID NO: 438 - DNA, 36 bp, Artificial Sequence
  Description of Artificial Sequence: Synthetic oligonucleotide
gcccaaaggcagctcggcgcctacagaagccgagac

SEQ ID NO: 439 - DNA, 37 bp, Artificial Sequence
  Description of Artificial Sequence: Synthetic oligonucleotide
ggtcgaaatgcctgcgcaggggcttcaacgctgcgac

SEQ ID NO: 440 - DNA, 36 bp, Artificial Sequence
  Description of Artificial Sequence: Synthetic oligonucleotide
atcgaagagcctgcgcagaggcttttgatctgcgat

SEQ ID NO: 441-1000 - skipped (560 entries)

SEQ ID NO: 1001 - DNA, 54 bp, Artificial Sequence
  Description of Artificial Sequence: Synthetic oligonucleotide
  modified_base (37)..(54): a, c, t, g, unknown or other
tttcatcggccatcgcggcggcctcgtagctgcgacnnnnnnnnnnnnnnnnnn

SEQ ID NO: 1002 - DNA, 53 bp, Artificial Sequence
  Description of Artificial Sequence: Synthetic oligonucleotide
  modified_base (36)..(53): a, c, t, g, unknown or other
ttcatcggccatcgcggcggcctcgtagctgcgacnnnnnnnnnnnnnnnnnn

SEQ ID NO: 1003 - DNA, 52 bp, Artificial Sequence
  Description of Artificial Sequence: Synthetic oligonucleotide
  modified_base (35)..(52): a, c, t, g, unknown or other
acaacagccattaccctggcttagtaagggtgacnnnnnnnnnnnnnnnnnn

SEQ ID NO: 1004 - DNA, 53 bp, Artificial Sequence
  Description of Artificial Sequence: Synthetic oligonucleotide
  modified_base (36)..(53): a, c, t, g, unknown or other
ttccaaggcgatcacagccgcctagtagttgtgacnnnnnnnnnnnnnnnnnn

SEQ ID NO: 1005 - protein, 2 aa, Artificial Sequence
  Description of Artificial Sequence: Synthetic peptide
GS

SEQ ID NO: 1006 - protein, 7 aa, Artificial Sequence
  Description of Artificial Sequence: Synthetic peptide
GSGGGGS

SEQ ID NO: 1007 - protein, 15 aa, Artificial Sequence
  Description of Artificial Sequence: Synthetic peptide
GGGGSGGGGSGGGGS

SEQ ID NO: 1008 - protein, 18 aa, Artificial Sequence
  Description of Artificial Sequence: Synthetic peptide
GGSGGSGGSGGSGGSGGS

SEQ ID NO: 1009 - protein, 32 aa, Artificial Sequence
  Description of Artificial Sequence: Synthetic polypeptide
SGGSSGGSSGSETPGTSESATPESSGGSSGGS

SEQ ID NO: 1010 - protein, 167 aa, Artificial Sequence
  Description of Artificial Sequence: Synthetic polypeptide
MSEVEFSHEYWMRHALTLAKRAWDEREVPVGAVLVHNNRVIGEGWNRPIGRHDPTAHAEIMALRQGGLVMQNYRLIDATLYVTLEPCVMCAGAMIHSRIGRVVFGARDAKTGAAGSLMDVLHHPGMNHRVEITEGILADECAALLSDFFRMRRQEIKAQKKAQSSTD

SEQ ID NO: 1011 - protein, 167 aa, Artificial Sequence; identical to SEQ ID NO: 1010
  Description of Artificial Sequence: Synthetic polypeptide

SEQ ID NO: 1012 - protein, 198 aa, Artificial Sequence [sequence omitted]

SEQ ID NO: 1013 - protein, 208 aa, Artificial Sequence
  Description of Artificial Sequence: Synthetic polypeptide
MTDAEYVRIHEKLDIYTFKKQFFNNKKSVSHRCYVLFELKRRGERRACFWGYAVNKPQSGTERGIHAEIFSIRKVEEYLRDNPGQFTINWYSSWSPCADCAEKILEWYNQELRGNGHTLKIWACKLYYEKNARNQIGLWNLRDNGVGLNVMVSEHYQCCRKIFIQSSHNQLNENRWLEKTLKRAEKRRSELSIMIQVKILHTTKSPAV

SEQ ID NO: 1014 - protein, 229 aa, Artificial Sequence [sequence omitted]

SEQ ID NO: 1015 - protein, 4 aa, Unknown
  Description of Unknown: KDEL retention sequence
KDEL

SEQ ID NO: 1016 - protein, 5 aa, Artificial Sequence
  Description of Artificial Sequence: Synthetic peptide
EAAAK

SEQ ID NO: 1017 - DNA, 36 bp, Artificial Sequence
  Description of Artificial Sequence: Synthetic oligonucleotide
gtcacaatgcctgcgcagaggctttgtttctgcgac

SEQ ID NO: 1018 - DNA, 37 bp, Artificial Sequence
  Description of Artificial Sequence: Synthetic oligonucleotide
cgtcgcaacgcctgcggagaggccttgtttctccgac

SEQ ID NO: 1019 - DNA, 36 bp, Artificial Sequence
  Description of Artificial Sequence: Synthetic oligonucleotide
ccgacaacgcctgcgcaggggcttggtttctgcgac

SEQ ID NO: 1020 - DNA, 38 bp, Artificial Sequence
  Description of Artificial Sequence: Synthetic oligonucleotide
gggtggcagtgcctgctcagaggcttagtatctgtgac

SEQ ID NO: 1021 - DNA, 37 bp, Artificial Sequence
  Description of Artificial Sequence: Synthetic oligonucleotide
tgtggcagtgcctgctcagaggcttagtatctgtgac

SEQ ID NO: 1022 - DNA, 36 bp, Artificial Sequence
  Description of Artificial Sequence: Synthetic oligonucleotide
gtgtcaacgccagcgcggaggcgtgaaatccgagac

SEQ ID NO: 1023 - RNA, 36 nt, Artificial Sequence
  Description of Artificial Sequence: Synthetic oligonucleotide
guguuaugcccaucucagcgggcugguugcugagac

SEQ ID NO: 1024 - RNA, 25 nt, Artificial Sequence
  Description of Artificial Sequence: Synthetic oligonucleotide
guuauaguggccauuguaggggcuu

SEQ ID NO: 1025 - RNA, 37 nt, Artificial Sequence
  Description of Artificial Sequence: Synthetic oligonucleotide
guuucaucggccaucgcggcggccucguagcugcgac

SEQ ID NO: 1026 - RNA, 36 nt, Artificial Sequence
  Description of Artificial Sequence: Synthetic oligonucleotide
gguuuaaggcgaucacggccgccuaguugccgcgac

SEQ ID NO: 1027 - RNA, 27 nt, Artificial Sequence
  Description of Artificial Sequence: Synthetic oligonucleotide
guuucaucagccauugcaggggcuuug

SEQ ID NO: 1028 - RNA, 37 nt, Artificial Sequence
  Description of Artificial Sequence: Synthetic oligonucleotide
ggugcucaagccaucgcagcggcaucguugcugcgac

SEQ ID NO: 1029 - RNA, 29 nt, Artificial Sequence
  Description of Artificial Sequence: Synthetic oligonucleotide
gagcgguuaacagggugucgauauagauu

SEQ ID NO: 1030 - RNA, 37 nt, Artificial Sequence
  Description of Artificial Sequence: Synthetic oligonucleotide
guaacaacagccauuacccuggcuuaguaagggugac

SEQ ID NO: 1031 - RNA, 34 nt, Artificial Sequence
  Description of Artificial Sequence: Synthetic oligonucleotide
aguagaacccugucgcuugggcgguaaagcgaac

SEQ ID NO: 1032 - RNA, 36 nt, Artificial Sequence
  Description of Artificial Sequence: Synthetic oligonucleotide
gauuaaggccccugugcauugggguguaaaugcaac

SEQ ID NO: 1033 - RNA, 36 nt, Artificial Sequence
  Description of Artificial Sequence: Synthetic oligonucleotide
gucuaaggccccugugcauugggguguaaaugcaac

SEQ ID NO: 1034 - RNA, 36 nt, Artificial Sequence
  Description of Artificial Sequence: Synthetic oligonucleotide
cuuuaaggacccuguacguugggguguaaacguaac

SEQ ID NO: 1035 - RNA, 26 nt, Artificial Sequence
  Description of Artificial Sequence: Synthetic oligonucleotide
gguaucaugacccuacgggugggggg

SEQ ID NO: 1036 - RNA, 29 nt, Artificial Sequence
  Description of Artificial Sequence: Synthetic oligonucleotide
agccaucgcaggggcuuggugcuugcgac

SEQ ID NO: 1037 - RNA, 36 nt, Artificial Sequence
  Description of Artificial Sequence: Synthetic oligonucleotide
auuccaaggcgaucacagccgccuaguaguugugac

SEQ ID NO: 1038 - RNA, 37 nt, Artificial Sequence
  Description of Artificial Sequence: Synthetic oligonucleotide
guuuuagaacccuguugagugggcauaaacucaaacu

SEQ ID NO: 1039 - RNA, 26 nt, Artificial Sequence
  Description of Artificial Sequence: Synthetic oligonucleotide
gguaucaugacccuacggaugggggg

SEQ ID NO: 1040 - RNA, 36 nt, Artificial Sequence
  Description of Artificial Sequence: Synthetic oligonucleotide
gauucauagcccugucgguugggcgguaaaccgaac

SEQ ID NO: 1041 - RNA, 37 nt, Artificial Sequence
  Description of Artificial Sequence: Synthetic oligonucleotide
gucucaauagcgaucggcgccgcuuaguagggucgac

SEQ ID NO: 1042 - RNA, 38 nt, Artificial Sequence
  Description of Artificial Sequence: Synthetic oligonucleotide
gguaacaauagcgaucggcgccgcuugguagugucgac

SEQ ID NO: 1043 - RNA, 37 nt, Artificial Sequence
  Description of Artificial Sequence: Synthetic oligonucleotide
aucucaauggccaucgucggggcuuuguaccggcgac

SEQ ID NO: 1044 - DNA, 2373 bp, Artificial Sequence
  Description of Artificial Sequence: Synthetic polynucleotide
  modified_base (2145)..(2178): a, c, t, g, unknown or other
taatacgactcactataggggaattgtgagcggataacaattcccctctagatttacactttatgcttccggctcgtatgtttctagagaattcaaataattttgtttaactttaagaaggagatttaaatatgaaaatcgaagaaggtaaaggtcaccatcaccatcaccacatgaaactgagtccggcactgcctccgaccggtgatgttctgatttatgaatatggtgcacgtgttgatggtgattgtctgcctgcagttggtgatcagattgcaaaagcacgtcgtctgtataatgatctggttgcagttattcgtggcatcgttgatgaaatgcgtggttttgttctgaaacatgcaggtagcgaagcgctggccctgcaggcacgcattgatggtctgagcgaagcatttgatgcagcacgtgcagcaaatgatgaagatcgtatgaaacaaattgccggtgaacgtcgtgcactgtgggcagaactgggtgaacaggttaaagcagttcgtaaagcacatcgtgcagaaatccaagaactgtttctgagccgtattggtaaaaaaagcacctgtgatacctatcagatgcgttgtaaagccgttggtgatggtttaggttgggcaaccgcaaatcaggttctggatgccgcactgcaggcctttaaaaccagctttcagcgtggtcaggcaccgcgttttgcacgtggtgaagaaaaaattcaggataccctgacactgcagtttaccgcagccggtggtgttccggttgcagcactgctgagcggtgatcattcagaactgagcatggttagcagctgtggtcgtcgtaaatatggtagctttagctttcgtctgggtagcgcaagcgcagatacctatgcaaatggcacctggcagtatcatcgtccgctgccggatggtgcaaccgttggtctggcacgtctggttcgtcgtagcgttggtaaagatttcaaatgggcactgcagctgatggttaaacgtccggcaaccgaaccggcaatgatggaaggtcgtaaaccgctggttgccgttcattttggttgggctggtgatgcaagcggtcgtcgtgttgcaggtattaccgatggtgcagatccgggtgttgcccgtgttctgcagctgccggttgaagttgaagatggtattcgtcgtgcagcagaatttcagagcgcacgtgatgaagcccgtgatgttattatgaccaccattaaaaacattgcatggggtgatgcagttgcatgtctgggtgaaagcagccagtttatgcatggtagtgaaccgtggctgcgtgcacgtctgagtgaagaactgagtaccattcgtcgtctgccagcacagcatgttgcaccgcgtcgcctgcatcgtctgtgtggtctgctgcgtgccaccaatcagatgcatgatgaactggaagcatggcgtaaacaggatcgtctggcatggcaggcaagcgcacatatggcacgtcgtgcccgtaatctgcgcaaagatttttatcgtcgtgtggcaattgatctggcacgccgttatagcgcaattgttctggaaccgctggatctggcagcagcagcactgaaagttaatgaaattacaggcgaaaaaaccgaatttgccaaaaaagcccgtagcggtcgtgttgtggcagcaatttatgagctggaaagcagcattcgttgggcagcagccaaaagcggcaccgcactgctggacctgagtggtgcagaaaccgcagcacgttgtggtatttgtggtggtgcaagccagagtgatgaaagcaatagccaggttctgcattgtgttgaatgtggtgccgaactggatcgcaaaaaaaacggtgcagcaattgcatggcagtttgcacatgaaaatctggatgaagcagttaccgatttttgggcagccgttattgcacagcgttgtgaacatgcagaaaaaacccgtgaaaaaaaagccaaaatggcagaaggtcgtcgcctggcacgtaccctgagtgccggtgttagcgcagttggtagccgtaatgtttaataagaattcctcgagttgacagctagctcagtcctaggtataatgctagcgtttcatcggccatcgcggcggcctcgtagctgcgacnnnnnnnnnnnnnnnnnnnnnnnnnnnnnnnnnngtttcatcggccatcgcggcggcctcgtagctgcgacgctaaagatatgaggagctcaaactcgagctgctaacaaagcccgaaaggaagctgagttggctgctgccaccgctgagcaataactagcataaccccttggggcctctaaacgggtcttgaggggttttttgctgaaaggaggaactatatccggat

SEQ ID NO: 1045 - DNA, 110 bp, Artificial Sequence
  Description of Artificial Sequence: Synthetic polynucleotide
agtttcatcggccatcgcggcggcctcgtagctgcgacaaaaaaaaaaaaaaaaaaaaaaaaaaaaaaaaaaagtttcatcggccatcgcggcggcctcgtagctgcgac

SEQ ID NO: 1046 - DNA, 54 bp, Artificial Sequence
  Description of Artificial Sequence: Synthetic oligonucleotide
tttcatcggccatcgcggcggcctcgtagctgcgacaaaaaaaaaaaaaaaaaa

SEQ ID NO: 1047 - DNA, 60 bp, Artificial Sequence
  Description of Artificial Sequence: Synthetic oligonucleotide
  modified_base (37)..(60): a, c, t, g, unknown or other
  misc_feature (37)..(60): This region may encompass 16-24 nucleotides
tttcatcggccatcgcggcggcctcgtagctgcgacnnnnnnnnnnnnnnnnnnnnnnnn

SEQ ID NO: 1048 - RNA, 54 nt, Artificial Sequence
  Description of Artificial Sequence: Synthetic oligonucleotide
  modified_base (37)..(54): a, c, u, g, unknown or other
uuucaucggccaucgcggcggccucguagcugcgacnnnnnnnnnnnnnnnnnn

SEQ ID NO: 1049 - DNA, 112 bp, Artificial Sequence
  Description of Artificial Sequence: Synthetic polynucleotide
tgtaacaacagccattaccctggcttagtaagggtgacaaaaaaaaaaaaaaaaaaaaaaaaaaaaaaaaaaagtaacaacagccattaccctggcttagtaagggtgacca

SEQ ID NO: 1050 - DNA, 52 bp, Artificial Sequence
  Description of Artificial Sequence: Synthetic oligonucleotide
acaacagccattaccctggcttagtaagggtgacaaaaaaaaaaaaaaaaaa

SEQ ID NO: 1051 - DNA, 58 bp, Artificial Sequence
  Description of Artificial Sequence: Synthetic oligonucleotide
  modified_base (35)..(58): a, c, t, g, unknown or other
  misc_feature (35)..(58): This region may encompass 16-24 nucleotides
acaacagccattaccctggcttagtaagggtgacnnnnnnnnnnnnnnnnnnnnnnnn

SEQ ID NO: 1052 - RNA, 52 nt, Artificial Sequence
  Description of Artificial Sequence: Synthetic oligonucleotide
  modified_base (35)..(52): a, c, u, g, unknown or other
acaacagccauuacccuggcuuaguaagggugacnnnnnnnnnnnnnnnnnn

SEQ ID NO: 1053 - DNA, 110 bp, Artificial Sequence
  Description of Artificial Sequence: Synthetic polynucleotide
aattccaaggcgatcacagccgcctagtagttgtgacaaaaaaaaaaaaaaaaaaaaaaaaaaaaaaaaaaaaattccaaggcgatcacagccgcctagtagttgtgaca

SEQ ID NO: 1054 - DNA, 53 bp, Artificial Sequence
  Description of Artificial Sequence: Synthetic oligonucleotide
ttccaaggcgatcacagccgcctagtagttgtgacaaaaaaaaaaaaaaaaaa

SEQ ID NO: 1055 - RNA, 53 nt, Artificial Sequence
  Description of Artificial Sequence: Synthetic oligonucleotide
  modified_base (36)..(53): a, c, u, g, unknown or other
uuccaaggcgaucacagccgccuaguaguugugacnnnnnnnnnnnnnnnnnn

SEQ ID NO: 1056 - DNA, 59 bp, Artificial Sequence
  Description of Artificial Sequence: Synthetic oligonucleotide
  modified_base (36)..(59): a, c, t, g, unknown or other
  misc_feature (36)..(59): This region may encompass 16-24 nucleotides
ttccaaggcgatcacagccgcctagtagttgtgacnnnnnnnnnnnnnnnnnnnnnnnn

SEQ ID NO: 1057 - protein, 627 aa, Artificial Sequence
  Description of Artificial Sequence: Synthetic polypeptide
MKLSPALPPTGDVLIYEYGARVDGDCLPAVGDQIAKARRLYNDLVAVIRGIVDEMRGFVLKHAGSEALALQARIDGLSEAFDAARAANDEDRMKQIAGERRALWAELGEQVKAVRKAHRAEIQELFLSRIGKKSTCDTYQMRCKAVGDGLGWATANQVLDAALQAFKTSFQRGQAPRFARGEEKIQDTLTLQFTAAGGVPVAALLSGDHSELSMVSSCGRRKYGSFSFRLGSASADTYANGTWQYHRPLPDGATVGLARLVRRSVGKDFKWALQLMVKRPATEPAMMEGRKPLVAVAFGWAGDASGRRVAGITDGADPGVARVLQLPVEVEDGIRRAAEFQSARDEARDVIMTTIKNIAWGDAVACLGESSQFMHGSEPWLRARLSEELSTIRRLPAQHVAPRRLHRLCGLLRATNQMHDELEAWRKQDRLAWQASAHMARRARNLRKDFYRRVAIDLARRYSAIVLEPLDLAAAALKVNEITGEKTEFAKKARSGRVVAAIYELESSIRWAAAKSGTALLDLSGAETAARCGICGGASQSDESNSQVLHCVECGAELDRKKNGAAIAWQFAHENLDEAVTDFWAAVIAQRCEHAEKTREKKAKMAEGRRLARTLSAGVSAVGSRNV

SEQ ID NO: 1058 - protein, 627 aa, Artificial Sequence
  Description of Artificial Sequence: Synthetic polypeptide
MKLSPALPPTGDVLIYEYGARVDGDCLPAVGDQIAKARRLYNDLVAVIRGIVDEMRGFVLKHAGSEALALQARIDGLSEAFDAARAANDEDRMKQIAGERRALWAELGEQVKAVRKAHRAEIQELFLSRIGKKSTCDTYQMRCKAVGDGLGWATANQVLDAALQAFKTSFQRGQAPRFARGEEKIQDTLTLQFTAAGGVPVAALLSGDHSELSMVSSCGRRKYGSFSFRLGSASADTYANGTWQYHRPLPDGATVGLARLVRRSVGKDFKWALQLMVKRPATEPAMMEGRKPLVAVHFGWAGAASGRRVAGITDGADPGVARVLQLPVEVEDGIRRAAEFQSARDEARDVIMTTIKNIAWGDAVACLGESSQFMHGSEPWLRARLSEELSTIRRLPAQHVAPRRLHRLCGLLRATNQMHDELEAWRKQDRLAWQASAHMARRARNLRKDFYRRVAIDLARRYSAIVLEPLDLAAAALKVNEITGEKTEFAKKARSGRVVAAIYELESSIRWAAAKSGTALLDLSGAETAARCGICGGASQSDESNSQVLHCVECGAELDRKKNGAAIAWQFAHENLDEAVTDFWAAVIAQRCEHAEKTREKKAKMAEGRRLARTLSAGVSAVGSRNV

SEQ ID NO: 1059 - protein, 627 aa, Artificial Sequence
  Description of Artificial Sequence: Synthetic polypeptide
MKLSPALPPTGDVLIYEYGARVDGDCLPAVGDQIAKARRLYNDLVAVIRGIVDEMRGFVLKHAGSEALALQARIDGLSEAFDAARAANDEDRMKQIAGERRALWAELGEQVKAVRKAHRAEIQELFLSRIGKKSTCDTYQMRCKAVGDGLGWATANQVLDAALQAFKTSFQRGQAPRFARGEEKIQDTLTLQFTAAGGVPVAALLSGDHSELSMVSSCGRRKYGSFSFRLGSASADTYANGTWQYHRPLPDGATVGLARLVRRSVGKDFKWALQLMVKRPATEPAMMEGRKPLVAVHFGWAGDASGRRVAAITDGADPGVARVLQLPVEVEDGIRRAAEFQSARDEARDVIMTTIKNIAWGDAVACLGESSQFMHGSEPWLRARLSEELSTIRRLPAQHVAPRRLHRLCGLLRATNQMHDELEAWRKQDRLAWQASAHMARRARNLRKDFYRRVAIDLARRYSAIVLEPLDLAAAALKVNEITGEKTEFAKKARSGRVVAAIYELESSIRWAAAKSGTALLDLSGAETAARCGICGGASQSDESNSQVLHCVECGAELDRKKNGAAIAWQFAHENLDEAVTDFWAAVIAQRCEHAEKTREKKAKMAEGRRLARTLSAGVSAVGSRNV

SEQ ID NO: 1060 - protein, 627 aa, Artificial Sequence
  Description of Artificial Sequence: Synthetic polypeptide
MKLSPALPPTGDVLIYEYGARVDGDCLPAVGDQIAKARRLYNDLVAVIRGIVDEMRGFVLKHAGSEALALQARIDGLSEAFDAARAANDEDRMKQIAGERRALWAELGEQVKAVRKAHRAEIQELFLSRIGKKSTCDTYQMRCKAVGDGLGWATANQVLDAALQAFKTSFQRGQAPRFARGEEKIQDTLTLQFTAAGGVPVAALLSGDHSELSMVSSCGRRKYGSFSFRLGSASADTYANGTWQYHRPLPDGATVGLARLVRRSVGKDFKWALQLMVKRPATEPAMMEGRKPLVAVHFGWAGDASGRRVAGITDGADPGVARVLQLPVEVEDGIRRAAEFQSARDEARDVIMTTIKNIAWGDAVACLGESSQFMHGSEPWLRARLSEELSTIRRLPAQHVAPRRLHRLCGLLRATNQMHDELEAWRKQDRLAWQASAHMARRARNLRKDFYRRVAIDLARRYSAIVLEPLDLAAAALKVNEITGEKTEFAKKARSGRVVAAIYALESSIRWAAAKSGTALLDLSGAETAARCGICGGASQSDESNSQVLHCVECGAELDRKKNGAAIAWQFAHENLDEAVTDFWAAVIAQRCEHAEKTREKKAKMAEGRRLARTLSAGVSAVGSRNV

SEQ ID NO: 1061 - protein, 627 aa, Artificial Sequence
  Description of Artificial Sequence: Synthetic polypeptide
MKLSPALPPTGDVLIYEYGARVDGDCLPAVGDQIAKARRLYNDLVAVIRGIVDEMRGFVLKHAGSEALALQARIDGLSEAFDAARAANDEDRMKQIAGERRALWAELGEQVKAVRKAHRAEIQELFLSRIGKKSTCDTYQMRCKAVGDGLGWATANQVLDAALQAFKTSFQRGQAPRFARGEEKIQDTLTLQFTAAGGVPVAALLSGDHSELSMVSSCGRRKYGSFSFRLGSASADTYANGTWQYHRPLPDGATVGLARLVRRSVGKDFKWALQLMVKRPATEPAMMEGRKPLVAVHFGWAGDASGRRVAGITDGADPGVARVLQLPVEVEDGIRRAAEFQSARDEARDVIMTTIKNIAWGDAVACLGESSQFMHGSEPWLRARLSEELSTIRRLPAQHVAPRRLHRLCGLLRATNQMHDELEAWRKQDRLAWQASAHMARRARNLRKDFYRRVAIDLARRYSAIVLEPLDLAAAALKVNEITGEKTEFAKKARSGRVVAAIYELESSIRWAAAKSGTALLDLSGAETAARCGICGGASQSDESNSQVLHCVECGAELARKKNGAAIAWQFAHENLDEAVTDFWAAVIAQRCEHAEKTREKKAKMAEGRRLARTLSAGVSAVGSRNV

SEQ ID NO: 1062 - protein, 631 aa, Artificial Sequence
  Description of Artificial Sequence: Synthetic polypeptide
MIVQITPAPLPQGDVRIYEFGARLDHDCVRTVDEQIFKAHQLYNQLVACMQTTVRDMQAYLLDHAGPDAHAAKARVDGLNEAFNAARAANDENRMTTVATERREAWRALAAVLRIARKEHRTAMQETFLSRIGKKSACETYQLRCKAVADGLGWATANATLDAALIAFKKSFALGRAPRFARIADSIQDTLTLQFTAAGGINIERLLDGKHTELALKPPAVCGKRGYGTFAFRLGAASAETQATGTWQYHRPLPPGGTVGLARLVRRRIGPKTTWSLQLQVRSPLPEREHEDRRPLVTVAPGWAADLSGRRIAGIADAADPGLATVLQLPPDIEHGLQRAAELESTRSQARDALTPMLKVHPWPQELLNAATPEEDASASGDSGPMAPERIMCRKVADEILALRRLPAQHIAIRRLHRLARWLRLAEVDVPDWLETWRKEDKLRWQASAAAAKRARNRRRGFYRETALRLASQYQAIVIEPLNLADAAKKIDEATGERSDFAKKARAGRVVAAIFELDSAIRWAATKCGTAVLDLTGETAQHCAICGGHSLKADDEDSQCLRCSDCGADIDRKRNGAALAWQAAAAHLETHLEDFWRLTLENRASAAAKRDEKKTKLQEGRRAAMRETLET

SEQ ID NO: 1063 - protein, 631 aa, Artificial Sequence
  Description of Artificial Sequence: Synthetic polypeptide
MIVQITPAPLPQGDVRIYEFGARLDHDCVRTVDEQIFKAHQLYNQLVACMQTTVRDMQAYLLDHAGPDAHAAKARVDGLNEAFNAARAANDENRMTTVATERREAWRALAAVLRIARKEHRTAMQETFLSRIGKKSACETYQLRCKAVADGLGWATANATLDAALIAFKKSFALGRAPRFARIADSIQDTLTLQFTAAGGINIERLLDGKHTELALKPPAVCGKRGYGTFAFRLGAASAETQATGTWQYHRPLPPGGTVGLARLVRRRIGPKTTWSLQLQVRSPLPEREHEDRRPLVTVHPGWAAALSGRRIAGIADAADPGLATVLQLPPDIEHGLQRAAELESTRSQARDALTPMLKVHPWPQELLNAATPEEDASASGDSGPMAPERIMCRKVADEILALRRLPAQHIAIRRLHRLARWLRLAEVDVPDWLETWRKEDKLRWQASAAAAKRARNRRRGFYRETALRLASQYQAIVIEPLNLADAAKKIDEATGERSDFAKKARAGRVVAAIFELDSAIRWAATKCGTAVLDLTGETAQHCAICGGHSLKADDEDSQCLRCSDCGADIDRKRNGAALAWQAAAAHLETHLEDFWRLTLENRASAAAKRDEKKTKLQEGRRAAMRETLET

SEQ ID NO: 1064 - protein, 631 aa, Artificial Sequence
  Description of Artificial Sequence: Synthetic polypeptide
MIVQITPAPLPQGDVRIYEFGARLDHDCVRTVDEQIFKAHQLYNQLVACMQTTVRDMQAYLLDHAGPDAHAAKARVDGLNEAFNAARAANDENRMTTVATERREAWRALAAVLRIARKEHRTAMQETFLSRIGKKSACETYQLRCKAVADGLGWATANATLDAALIAFKKSFALGRAPRFARIADSIQDTLTLQFTAAGGINIERLLDGKHTELALKPPAVCGKRGYGTFAFRLGAASAETQATGTWQYHRPLPPGGTVGLARLVRRRIGPKTTWSLQLQVRSPLPEREHEDRRPLVTVHPGWAADLSGRRIAGIADAADPGLATVLQLPPAIEHGLQRAAELESTRSQARDALTPMLKVHPWPQELLNAATPEEDASASGDSGPMAPERIMCRKVADEILALRRLPAQHIAIRRLHRLARWLRLAEVDVPDWLETWRKEDKLRWQASAAAAKRARNRRRGFYRETALRLASQYQAIVIEPLNLADAAKKIDEATGERSDFAKKARAGRVVAAIFELDSAIRWAATKCGTAVLDLTGETAQHCAICGGHSLKADDEDSQCLRCSDCGADIDRKRNGAALAWQAAAAHLETHLEDFWRLTLENRASAAAKRDEKKTKLQEGRRAAMRETLET

SEQ ID NO: 1065 - protein, 631 aa, Artificial Sequence
  Description of Artificial Sequence: Synthetic polypeptide
MIVQITPAPLPQGDVRIYEFGARLDHDCVRTVDEQIFKAHQLYNQLVACMQTTVRDMQAYLLDHAGPDAHAAKARVDGLNEAFNAARAANDENRMTTVATERREAWRALAAVLRIARKEHRTAMQETFLSRIGKKSACETYQLRCKAVADGLGWATANATLDAALIAFKKSFALGRAPRFARIADSIQDTLTLQFTAAGGINIERLLDGKHTELALKPPAVCGKRGYGTFAFRLGAASAETQATGTWQYHRPLPPGGTVGLARLVRRRIGPKTTWSLQLQVRSPLPEREHEDRRPLVTVHPGWAADLSGRRIAGIADAADPGLATVLQLPPDIEHGLQRAAELESTRSQARDALTPMLKVHPWPQELLNAATPEEDASASGDSGPMAPERIMCRKVADEILALRRLPAQHIAIRRLHRLARWLRLAEVDVPDWLETWRKEDKLRWQASAAAAKRARNRRRGFYRETALRLASQYQAIVIEPLNLADAAKKIDEATGERSDFAKKARAGRVVAAIFALDSAIRWAATKCGTAVLDLTGETAQHCAICGGHSLKADDEDSQCLRCSDCGADIDRKRNGAALAWQAAAAHLETHLEDFWRLTLENRASAAAKRDEKKTKLQEGRRAAMRETLET

SEQ ID NO: 1066 - protein, 631 aa, Artificial Sequence
  Description of Artificial Sequence: Synthetic polypeptide
MIVQITPAPLPQGDVRIYEFGARLDHDCVRTVDEQIFKAHQLYNQLVACMQTTVRDMQAYLLDHAGPDAHAAKARVDGLNEAFNAARAANDENRMTTVATERREAWRALAAVLRIARKEHRTAMQETFLSRIGKKSACETYQLRCKAVADGLGWATANATLDAALIAFKKSFALGRAPRFARIADSIQDTLTLQFTAAGGINIERLLDGKHTELALKPPAVCGKRGYGTFAFRLGAASAETQATGTWQYHRPLPPGGTVGLARLVRRRIGPKTTWSLQLQVRSPLPEREHEDRRPLVTVHPGWAADLSGRRIAGIADAADPGLATVLQLPPDIEHGLQRAAELESTRSQARDALTPMLKVHPWPQELLNAATPEEDASASGDSGPMAPERIMCRKVADEILALRRLPAQHIAIRRLHRLARWLRLAEVDVPDWLETWRKEDKLRWQASAAAAKRARNRRRGFYRETALRLASQYQAIVIEPLNLADAAKKIDEATGERSDFAKKARAGRVVAAIFELDSAIRWAATKCGTAVLDLTGETAQHCAICGGHSLKADDEDSQCLRCSDCGAAIDRKRNGAALAWQAAAAHLETHLEDFWRLTLENRASAAAKRDEKKTKLQEGRRAAMRETLET

SEQ ID NO: 1067 - DNA, 148 bp, Artificial Sequence
  Description of Artificial Sequence: Synthetic polynucleotide
cccaacagaagcaaacctcggtcgcagctacgaggccgccgcgatggccgatgaaacccttccagttcggtgatatacgggatctctttctgtcgcagctacgaggccgccgcgatggccgatgaaacccctatagtgagtcgtatta

SEQ ID NO: 1068 - DNA, 148 bp, Artificial Sequence
  Description of Artificial Sequence: Synthetic polynucleotide
cccaacagaagcaaacctcggtcgcagctacgaggccgccgcgatggccgatgaaactatcccgcgttatcatcacattacctaccacaccgtcgcagctacgaggccgccgcgatggccgatgaaacccctatagtgagtcgtatta

SEQ ID NO: 1069 - DNA, 148 bp, Artificial Sequence
  Description of Artificial Sequence: Synthetic polynucleotide
cccaacagaagcaaacctcggtcacaactactaggcggctgtgatcgccttggaatcgccttccagttcggtgatatacgggatctctttctgtcacaactactaggcggctgtgatcgccttggaatccctatagtgagtcgtatta

SEQ ID NO: 1070 - DNA, 148 bp, Artificial Sequence
  Description of Artificial Sequence: Synthetic polynucleotide
cccaacagaagcaaacctcggtcacaactactaggcggctgtgatcgccttggaatcatatcccgcgttatcatcacattacctaccacaccgtcacaactactaggcggctgtgatcgccttggaatccctatagtgagtcgtatta

SEQ ID NO: 1071 - DNA, 20 bp, Artificial Sequence
  Description of Artificial Sequence: Synthetic primer
aagggaacttgacaatgtca

SEQ ID NO: 1072 - DNA, 20 bp, Artificial Sequence
  Description of Artificial Sequence: Synthetic primer
ctatgcgtccctaatggagt

SEQ ID NO: 1073 - DNA, 20 bp, Artificial Sequence
  Description of Artificial Sequence: Synthetic primer
aagggaacttgacaatgtca

SEQ ID NO: 1074 - DNA, 20 bp, Artificial Sequence
  Description of Artificial Sequence: Synthetic primer
ctatgcgtccctaatggagt

SEQ ID NO: 1075 - DNA, 1023 bp, Artificial Sequence
  Description of Artificial Sequence: Synthetic polynucleotide
gatgcgtccggcgtagaggatcgagatctccaaaaaatggctgtttttgaaaaaaattctaaaggttgttttacgacagacgataacagggttgaaataattttgtttaactttaagaaggagatttaaatatgaaaatcgaagaaggtaaaggtcaccatcaccatcaccacggatccatgacggcattgacggaaggtgcaaaactgtttgagaaagagatcccgtatatcaccgaactggaaggcgacgtcgaaggtatgaaatttatcattaaaggcgagggtaccggtgacgcgaccacgggtaccattaaagcgaaatacatctgcactacgggcgacctgccggtcccgtgggcaaccctggtgagcaccctgagctacggtgttcagtgtttcgccaagtacccgagccacatcaaggatttctttaagagcgccatgccggaaggttatacccaagagcgtaccatcagcttcgaaggcgacggcgtgtacaagacgcgtgctatggttacctacgaacgcggttctatctacaatcgtgtcacgctgactggtgagaactttaagaaagacggtcacattctgcgtaagaacgttgcattccaatgcccgccaagcattctgtatattctgcctgacaccgttaacaatggcatccgcgttgagttcaaccaggcgtacgatattgaaggtgtgaccgaaaaactggttaccaaatgcagccaaatgaatcgtccgttggcgggctccgcggcagtgcatatcccgcgttatcatcacattacctaccacaccaaactgagcaaagaccgcgacgagcgccgtgatcacatgtgtctggtagaggtcgtgaaagcggttgatctggacacgtatcagtaataataactgctaacaaagcccgaaaggaagctgagttggctgctgccaccgctgagcaataactagcataaccccttggggcctctaaacgggtcttgaggggttttttgctgaaaggaggaactatatccgg

SEQ ID NO: 1076 - DNA, 5965 bp, Artificial Sequence
  Description of Artificial Sequence: Synthetic polynucleotide
attggcgaatgggacgcgccctgtagcggcgcattaagcgcggcgggtgtggtggttacgcgcagcgtgaccgctacacttgccagcgccctagcgcccgctcctttcgctttcttcccttcctttctcgccacgttcgccggctttccccgtcaagctctaaatcgggggctccctttagggttccgatttagtgctttacggcacctcgaccccaaaaaacttgattagggtgatggttcacgtagtgggccatcgccctgatagacggtttttcgccctttgacgttggagtccacgttctttaatagtggactcttgttccaaactggaacaacactcaaccctatctcggtctattcttttgatttataagggattttgccgatttcggcctattggttaaaaaatgagctgatttaacaaaaatttaacgcgaattttaacaaaatattaacgtttacaatttcaggtggcacttttcggggaaatgtgcgcggaacccctatttgtttatttttctaaatacattcaaatatgtatccgctcatgaattaattcttagaaaaactcatcgagcatcaaatgaaactgcaatttattcatatcaggattatcaataccatatttttgaaaaagccgtttctgtaatgaaggagaaaactcaccgaggcagttccataggatggcaagatcctggtatcggtctgcgattccgactcgtccaacatcaatacaacctattaatttcccctcgtcaaaaataaggttatcaagtgagaaatcaccatgagtgacgactgaatccggtgagaatggcaaaagtttatgcatttctttccagacttgttcaacaggccagccattacgctcgtcatcaaaatcactcgcatcaaccaaaccgttattcattcgtgattgcgcctgagcgagacgaaatacgcgatcgctgttaaaaggacaattacaaacaggaatcgaatgcaaccggcgcaggaacactgccagcgcatcaacaatattttcacctgaatcaggatattcttctaatacctggaatgctgttttcccggggatcgcagtggtgagtaaccatgcatcatcaggagtacggataaaatgcttgatggtcggaagaggcataaattccgtcagccagtttagtctgaccatctcatctgtaacatcattggcaacgctacctttgccatgtttcagaaacaactctggcgcatcgggcttcccatacaatcgatagattgtcgcacctgattgcccgacattatcgcgagcccatttatacccatataaatcagcatccatgttggaatttaatcgcggcctagagcaagacgtttcccgttgaatatggctcataacaccccttgtattactgtttatgtaagcagacagttttattgttcatgaccaaaatcccttaacgtgagttttcgttccactgagcgtcagaccccgtagaaaagatcaaaggatcttcttgagatcctttttttctgcgcgtaatctgctgcttgcaaacaaaaaaaccaccgctaccagcggtggtttgtttgccggatcaagagctaccaactctttttccgaaggtaactggcttcagcagagcgcagataccaaatactgtccttctagtgtagccgtagttaggccaccacttcaagaactctgtagcaccgcctacatacctcgctctgctaatcctgttaccagtggctgctgccagtggcgataagtcgtgtcttaccgggttggactcaagacgatagttaccggataaggcgcagcggtcgggctgaacggggggttcgtgcacacagcccagcttggagcgaacgacctacaccgaactgagatacctacagcgtgagctatgagaaagcgccacgcttcccgaagggagaaaggcggacaggtatccggtaagcggcagggtcggaacaggagagcgcacgagggagcttccagggggaaacgcctggtatctttatagtcctgtcgggtttcgccacctctgacttgagcgtcgatttttgtgatgctcgtcaggggggcggagcctatggaaaaacgccagcaacgcggcctttttacggttcctggccttttgctggccttttgctcacatgttctttcctgcgttatcccctgattctgtggataaccgtattaccgcctttgagtgagctgataccgctcgccgcagccgaacgaccgagcgcagcgagtcagtgagcgaggaagcggaagagcgcctgatgcggtattttctccttacgcatctgtgcggtatttcacaccgcatatatggtgcactctcagtacaatctgctctgatgccgcatagttaagccagtatacactccgctatcgctacgtgactgggtcatggctgcgccccgacacccgccaacacccgctgacgcgccctgacgggcttgtctgctcccggcatccgcttacagacaagctgtgaccgtctccgggagctgcatgtgtcagaggttttcaccgtcatcaccgaaacgcgcgaggcagctgcggtaaagctcatcagcgtggtcgtgaagcgattcacagatgtctgcctgttcatccgcgtccagctcgttgagtttctccagaagcgttaatgtctggcttctgataaagcgggccatgttaagggcggttttttcctgtttggtcactgatgcctccgtgtaagggggatttctgttcatgggggtaatgataccgatgaaacgagagaggatgctcacgatacgggttactgatgatgaacatgcccggttactggaacgttgtgagggtaaacaactggcggtatggatgcggcgggaccagagaaaaatcactcagggtcaatgccagcgcttcgttaatacagatgtaggtgttccacagggtagccagcagcatcctgcgatgcagatccggaacataatggtgcagggcgctgacttccgcgtttccagactttacgaaacacggaaaccgaagaccattcatgttgttgctcaggtcgcagacgttttgcagcagcagtcgcttcacgttcgctcgcgtatcggtgattcattctgctaaccagtaaggcaaccccgccagcctagccgggtcctcaacgacaggagcacgatcatgcgcacccgtggggccgccatgccggcgataatggcctgcttctcgccgaaacgtttggtggcgggaccagtgacgaaggcttgagcgagggcgtgcaagattccgaataccgcaagcgacaggccgatcatcgtcgcgctccagcgaaagcggtcctcgccgaaaatgacccagagcgctgccggcacctgtcctacgagttgcatgataaagaagacagtcataagtgcggcgacgatagtcatgccccgcgcccaccggaaggagctgactgggttgaaggctctcaagggcatcggtcgagatcccggtgcctaatgagtgagctaacttacattaattgcgttgcgctcactgcccgctttccagtcgggaaacctgtcgtgccagctgcattaatgaatcggccaacgcgcggggagaggcggtttgcgtattgggcgccagggtggtttttcttttcaccagtgagacgggcaacagctgattgcccttcaccgcctggccctgagagagttgcagcaagcggtccacgctggtttgccccagcaggcgaaaatcctgtttgatggtggttaacggcgggatataacatgagctgtcttcggtatcgtcgtatcccactaccgagatatccgcaccaacgcgcagcccggactcggtaatggcgcgcattgcgcccagcgccatctgatcgttggcaaccagcatcgcagtgggaacgatgccctcattcagcatttgcatggtttgttgaaaaccggacatggcactccagtcgccttcccgttccgctatcggctgaatttgattgcgagtgagatatttatgccagccagccagacgcagacgcgccgagacagaacttaatgggcccgctaacagcgcgatttgctggtgacccaatgcgaccagatgctccacgcccagtcgcgtaccgtcttcatgggagaaaataatactgttgatgggtgtctggtcagagacatcaagaaataacgccggaacattagtgcaggcagcttccacagcaatggcatcctggtcatccagcggatagttaatgatcagcccactgacgcgttgcgcgagaagattgtgcaccgccgctttacaggcttcgacgccgcttcgttctaccatcgacaccaccacgctggcacccagttgatcggcgcgagatttaatcgccgcgacaatttgcgacggcgcgtgcagggccagactggaggtggcaacgccaatcagcaacgactgtttgcccgccagttgttgtgccacgcggttgggaatgtaattcagctccgccatcgccgcttccactttttcccgcgttttcgcagaaacgtggctggcctggttcaccacgcgggaaacggtctgataagagacaccggcatactctgcgacatcgtataacgttactggtttcacattcaccaccctgaattgactctcttccgggcgctatcatgccataccgcgaaaggttttgcgccattcgatggtgtccgggatctcgacgctctcccttatgcgactcctgcattaggaagcagcccagtagtaggttgaggccgttgagcaccgccgccgcaaggaatggtgcatgcaaggagatggcgcccaacagtcccccggccacggggcctgccaccatacccacgccgaaacaagcgctcatgagcccgaagtggcgagcccgatcttccccatcggtgatgtcggcgatataggcgccagcaaccgcacctgtggcgccggtgatgccggccacgatgcgtccggcgtagaggatcgagatctccaaaaaatggctgtttttgaaaaaaattctaaaggttgttttacgacagacgataacagggttgaaataattttgtttaactttaagaaggagatttaaatatgaaaatcgaagaaggtaaaggtcaccatcaccatcaccacggatccatgacggcattgacggaaggtgcaaaactgtttgagaaagagatcccgtatatcaccgaactggaaggcgacgtcgaaggtatgaaatttatcattaaaggcgagggtaccggtgacgcgaccacgggtaccattaaagcgaaatacatctgcactacgggcgacctgccggtcccgtgggcaaccctggtgagcaccctgagctacggtgttcagtgtttcgccaagtacccgagccacatcaaggatttctttaagagcgccatgccggaaggttatacccaagagcgtaccatcagcttcgaaggcgacggcgtgtacaagacgcgtgctatggttacctacgaacgcggttctatctacaatcgtgtcacgctgactggtgagaactttaagaaagacggtcacattctgcgtaagaacgttgcattccaatgcccgccaagcattctgtatattctgcctgacaccgttaacaatggcatccgcgttgagttcaaccaggcgtacgatattgaaggtgtgaccgaaaaactggttaccaaatgcagccaaatgaatcgtccgttggcgggctccgcggcagtgcatatcccgcgttatcatcacattacctaccacaccaaactgagcaaagaccgcgacgagcgccgtgatcacatgtgtctggtagaggtcgtgaaagcggttgatctggacacgtatcagtaataataactgctaacaaagcccgaaaggaagctgagttggctgctgccaccgctgagcaataactagcataaccccttggggcctctaaacgggtcttgaggggttttttgctgaaaggaggaactatatccgg
